United States Patent Application Publication US 2026/0317758 A1, published October 15, 2026 (application 19/657,840).

The application's sequence listing, which the Patent Office published only in electronic form, follows.

SEQUENCE LISTING (399 sequences)

SEQ ID NO: 1 - RNA, 124 nt, synthetic construct
  source 1..124: mol_type = other RNA; note = Description of Artificial Sequence: Synthetic polynucleotide
gttctgtcttttggtcaggacaaccgtctagctataagtgctgcagggtgtgagaaactcctattgctggacgatgtctcttacgaggcattagcacaaccaacagcatagtcaaataaatttt

SEQ ID NO: 2 - RNA, 120 nt, synthetic construct
  source 1..120: mol_type = other RNA; note = Description of Artificial Sequence: Synthetic polynucleotide
  modified_base 1: mod_base = OTHER; note = 2'-O-methylguanosine phosphorothioate
  modified_base 2: mod_base = OTHER; note = 2'-O-methyluridine phosphorothioate
  modified_base 3: mod_base = OTHER; note = 2'-O-methyluridine phosphorothioate
  modified_base 117: mod_base = OTHER; note = 2'-O-methyluridine phosphorothioate
  modified_base 118: mod_base = OTHER; note = 2'-O-methyladenosine phosphorothioate
  modified_base 119: mod_base = OTHER; note = 2'-O-methyladenosine phosphorothioate
  modified_base 120: mod_base = OTHER; note = 2'-O-methyladenosine
gttctgtcttttggtcaggacaaccgtctagctataagtgctgcagggtgtgagaaactcctattgctggacgatgtctcttacgaggcattagcacaaccaacagcatagtcaaataaa

SEQ ID NO: 3 - RNA, 124 nt, synthetic construct; identical to SEQ ID NO: 1
  source 1..124: mol_type = other RNA; note = Description of Artificial Sequence: Synthetic polynucleotide
  modified_base 1: mod_base = OTHER; note = 2'-O-methylguanosine phosphorothioate
  modified_base 2: mod_base = OTHER; note = 2'-O-methyluridine phosphorothioate
  modified_base 3: mod_base = OTHER; note = 2'-O-methyluridine phosphorothioate
  modified_base 121: mod_base = OTHER; note = 2'-O-methyluridine phosphorothioate
  modified_base 122: mod_base = OTHER; note = 2'-O-methyluridine phosphorothioate
  modified_base 123: mod_base = OTHER; note = 2'-O-methyluridine phosphorothioate
  modified_base 124: mod_base = OTHER; note = 2'-O-methyluridine

SEQ ID NO: 4 - RNA, 123 nt, synthetic construct
  source 1..123: mol_type = other RNA; note = Description of Artificial Sequence: Synthetic polynucleotide
  modified_base 1: mod_base = OTHER; note = 2'-O-methylguanosine phosphorothioate
  modified_base 2: mod_base = OTHER; note = 2'-O-methyluridine phosphorothioate
  modified_base 3: mod_base = OTHER; note = 2'-O-methyluridine phosphorothioate
  modified_base 116: mod_base = OTHER; note = 2'-O-methyluridine
  modified_base 117: mod_base = OTHER; note = 2'-O-methyladenosine
  modified_base 118: mod_base = OTHER; note = 2'-O-methyladenosine
  modified_base 119: mod_base = OTHER; note = 2'-O-methyladenosine
  modified_base 120: mod_base = OTHER; note = 2'-O-methyluridine phosphorothioate
  modified_base 121: mod_base = OTHER; note = 2'-O-methyluridine phosphorothioate
  modified_base 122: mod_base = OTHER; note = 2'-O-methyluridine phosphorothioate
  modified_base 123: mod_base = OTHER; note = 2'-O-methyluridine
gttctgtcttttggtcaggacaaccgtctagctataagtgctgcagggtgtgagaaactcctattgctggacgatgtctcttacgaggcattagcacaaccaacagcatgtcaaataaatttt

SEQ ID NO: 5 - RNA, 120 nt, synthetic construct
  source 1..120: mol_type = other RNA; note = Description of Artificial Sequence: Synthetic polynucleotide
  modified_base 1: mod_base = OTHER; note = 2'-O-methylguanosine phosphorothioate
  modified_base 2: mod_base = OTHER; note = 2'-O-methyluridine phosphorothioate
  modified_base 3: mod_base = OTHER; note = 2'-O-methyluridine phosphorothioate
  modified_base 117: mod_base = OTHER; note = 2'-O-methyladenosine phosphorothioate
  modified_base 118: mod_base = OTHER; note = 2'-O-methyluridine phosphorothioate
  modified_base 119: mod_base = OTHER; note = 2'-O-methyluridine phosphorothioate
  modified_base 120: mod_base = OTHER; note = 2'-O-methylcytidine
gttctgtcttttggtcaggacaaccgtctagctataagtgctgcagggtgtgagaaactcctattgctggacgatgtctcttacgaggcattagcacaggtagtccatggacattaattc

SEQ ID NO: 6 - RNA, 123 nt, synthetic construct
  source 1..123: mol_type = other RNA; note = Description of Artificial Sequence: Synthetic polynucleotide
  modified_base 1: mod_base = OTHER; note = 2'-O-methylguanosine phosphorothioate
  modified_base 2: mod_base = OTHER; note = 2'-O-methyluridine phosphorothioate
  modified_base 3: mod_base = OTHER; note = 2'-O-methyluridine phosphorothioate
  modified_base 4: mod_base = OTHER; note = 2'-O-methylcytidine
  modified_base 5: mod_base = OTHER; note = 2'-O-methyluridine
  modified_base 6: mod_base = OTHER; note = 2'-O-methylguanosine
  modified_base 7: mod_base = OTHER; note = 2'-O-methyluridine
  modified_base 11: mod_base = OTHER; note = 2'-O-methyluridine
  modified_base 16: mod_base = OTHER; note = 2'-O-methylcytidine
  modified_base 17: mod_base = OTHER; note = 2'-O-methyladenosine
  modified_base 18: mod_base = OTHER; note = 2'-O-methylguanosine
  modified_base 19: mod_base = OTHER; note = 2'-O-methylguanosine
  modified_base 20: mod_base = OTHER; note = 2'-O-methyladenosine
  modified_base 21: mod_base = OTHER; note = 2'-O-methylcytidine
  modified_base 25: mod_base = OTHER; note = 2'-O-methylcytidine
  modified_base 26: mod_base = OTHER; note = 2'-O-methylguanosine
  modified_base 27: mod_base = OTHER; note = 2'-O-methyluridine
  modified_base 28: mod_base = OTHER; note = 2'-O-methylcytidine
  modified_base 29: mod_base = OTHER; note = 2'-O-methyluridine
  modified_base 30: mod_base = OTHER; note = 2'-O-methyladenosine
  modified_base 31: mod_base = OTHER; note = 2'-O-methylguanosine
  modified_base 39: mod_base = OTHER; note = 2'-O-methyluridine
  modified_base 41: mod_base = OTHER; note = 2'-O-methyluridine
  modified_base 44: mod_base = OTHER; note = 2'-O-methyladenosine
  modified_base 45: mod_base = OTHER; note = 2'-O-methylguanosine
  modified_base 46: mod_base = OTHER; note = 2'-O-methylguanosine
  modified_base 47: mod_base = OTHER; note = 2'-O-methylguanosine
  modified_base 48: mod_base = OTHER; note = 2'-O-methyluridine
  modified_base 49: mod_base = OTHER; note = 2'-O-methylguanosine
  modified_base 50: mod_base = OTHER; note = 2'-O-methyluridine
  modified_base 51: mod_base = OTHER; note = 2'-O-methylguanosine
  modified_base 56: mod_base = OTHER; note = 2'-O-methyladenosine
  modified_base 57: mod_base = OTHER; note = 2'-O-methylcytidine
  modified_base 58: mod_base = OTHER; note = 2'-O-methyluridine
  modified_base 59: mod_base = OTHER; note = 2'-O-methylcytidine
  modified_base 60: mod_base = OTHER; note = 2'-O-methylcytidine
  modified_base 61: mod_base = OTHER; note = 2'-O-methyluridine
  modified_base 63: mod_base = OTHER; note = 2'-O-methyluridine
  modified_base 64: mod_base = OTHER; note = 2'-O-methyluridine
  modified_base 69: mod_base = OTHER; note = 2'-O-methylguanosine
  modified_base 70: mod_base = OTHER; note = 2'-O-methyladenosine
  modified_base 71: mod_base = OTHER; note = 2'-O-methylcytidine
  modified_base 72: mod_base = OTHER; note = 2'-O-methylguanosine
  modified_base 73: mod_base = OTHER; note = 2'-O-methyladenosine
  modified_base 74: mod_base = OTHER; note = 2'-O-methyluridine
  modified_base 75: mod_base = OTHER; note = 2'-O-methylguanosine
  modified_base 76: mod_base = OTHER; note = 2'-O-methyluridine
  modified_base 77: mod_base = OTHER; note = 2'-O-methylcytidine
  modified_base 78: mod_base = OTHER; note = 2'-O-methyluridine
  modified_base 79: mod_base = OTHER; note = 2'-O-methylcytidine
  modified_base 80: mod_base = OTHER; note = 2'-O-methyluridine
  modified_base 81: mod_base = OTHER; note = 2'-O-methyluridine
  modified_base 82: mod_base = OTHER; note = 2'-O-methyladenosine
  modified_base 83: mod_base = OTHER; note = 2'-O-methylcytidine
  modified_base 84: mod_base = OTHER; note = 2'-O-methylguanosine
  modified_base 85: mod_base = OTHER; note = 2'-O-methyladenosine
  modified_base 86: mod_base = OTHER; note = 2'-O-methylguanosine
  modified_base 120: mod_base = OTHER; note = 2'-O-methyluridine phosphorothioate
  modified_base 121: mod_base = OTHER; note = 2'-O-methyluridine phosphorothioate
  modified_base 122: mod_base = OTHER; note = 2'-O-methyluridine phosphorothioate
  modified_base 123: mod_base = OTHER; note = 2'-O-methyluridine
gttctgtcttttggtcaggacaaccgtctagctataagtctgcagggtgtgagaaactcctattgctggacgatgtctcttacgaggcattagcacaggtagtccatggacattaattctttt

SEQ ID NO: 7 - RNA, 124 nt, synthetic construct
  source 1..124: mol_type = other RNA; note = Description of Artificial Sequence: Synthetic polynucleotide
  modified_base 1: mod_base = OTHER; note = 2'-O-methylguanosine phosphorothioate
  modified_base 2: mod_base = OTHER; note = 2'-O-methyluridine phosphorothioate
  modified_base 3: mod_base = OTHER; note = 2'-O-methyluridine phosphorothioate
  modified_base 4: mod_base = OTHER; note = 2'-O-methylcytidine
  modified_base 5: mod_base = OTHER; note = 2'-O-methyluridine
  modified_base 6: mod_base = OTHER; note = 2'-O-methylguanosine
  modified_base 7: mod_base = OTHER; note = 2'-O-methyluridine
  modified_base 11: mod_base = OTHER; note = 2'-O-methyluridine
  modified_base 16: mod_base = OTHER; note = 2'-O-methylcytidine
  modified_base 17: mod_base = OTHER; note = 2'-O-methyladenosine
  modified_base 18: mod_base = OTHER; note = 2'-O-methylguanosine
  modified_base 19: mod_base = OTHER; note = 2'-O-methylguanosine
  modified_base 20: mod_base = OTHER; note = 2'-O-methyladenosine
  modified_base 21: mod_base = OTHER; note = 2'-O-methylcytidine
  modified_base 25: mod_base = OTHER; note = 2'-O-methylcytidine
  modified_base 26: mod_base = OTHER; note = 2'-O-methylguanosine
  modified_base 27: mod_base = OTHER; note = 2'-O-methyluridine
  modified_base 28: mod_base = OTHER; note = 2'-O-methylcytidine
  modified_base 29: mod_base = OTHER; note = 2'-O-methyluridine
  modified_base 30: mod_base = OTHER; note = 2'-O-methyladenosine
  modified_base 31: mod_base = OTHER; note = 2'-O-methylguanosine
  modified_base 39: mod_base = OTHER; note = 2'-O-methyluridine
  modified_base 42: mod_base = OTHER; note = 2'-O-methyluridine
  modified_base 45: mod_base = OTHER; note = 2'-O-methyladenosine
  modified_base 46: mod_base = OTHER; note = 2'-O-methylguanosine
  modified_base 47: mod_base = OTHER; note = 2'-O-methylguanosine
  modified_base 48: mod_base = OTHER; note = 2'-O-methylguanosine
  modified_base 49: mod_base = OTHER; note = 2'-O-methyluridine
  modified_base 50: mod_base = OTHER; note = 2'-O-methylguanosine
  modified_base 51: mod_base = OTHER; note = 2'-O-methyluridine
  modified_base 52: mod_base = OTHER; note = 2'-O-methylguanosine
  modified_base 57: mod_base = OTHER; note = 2'-O-methyladenosine
  modified_base 58: mod_base = OTHER; note = 2'-O-methylcytidine
  modified_base 59: mod_base = OTHER; note = 2'-O-methyluridine
  modified_base 60: mod_base = OTHER; note = 2'-O-methylcytidine
  modified_base 61: mod_base = OTHER; note = 2'-O-methylcytidine
  modified_base 62: mod_base = OTHER; note = 2'-O-methyluridine
  modified_base 64: mod_base = OTHER; note = 2'-O-methyluridine
  modified_base 65: mod_base = OTHER; note = 2'-O-methyluridine
  modified_base 70: mod_base = OTHER; note = 2'-O-methylguanosine
  modified_base 71: mod_base = OTHER; note = 2'-O-methyladenosine
  modified_base 72: mod_base = OTHER; note = 2'-O-methylcytidine
  modified_base 73: mod_base = OTHER; note = 2'-O-methylguanosine
  modified_base 74: mod_base = OTHER; note = 2'-O-methyladenosine
  modified_base 75: mod_base = OTHER; note = 2'-O-methyluridine
  modified_base 76: mod_base = OTHER; note = 2'-O-methylguanosine
  modified_base 77: mod_base = OTHER; note = 2'-O-methyluridine
  modified_base 78: mod_base = OTHER; note = 2'-O-methylcytidine
  modified_base 79: mod_base = OTHER; note = 2'-O-methyluridine
  modified_base 80: mod_base = OTHER; note = 2'-O-methylcytidine
  modified_base 81: mod_base = OTHER; note = 2'-O-methyluridine
  modified_base 82: mod_base = OTHER; note = 2'-O-methyluridine
  modified_base 83: mod_base = OTHER; note = 2'-O-methyladenosine
  modified_base 84: mod_base = OTHER; note = 2'-O-methylcytidine
  modified_base 85: mod_base = OTHER; note = 2'-O-methylguanosine
  modified_base 86: mod_base = OTHER; note = 2'-O-methyladenosine
  modified_base 87: mod_base = OTHER; note = 2'-O-methylguanosine
  modified_base 117: mod_base = OTHER; note = 2'-O-methyladenosine
  modified_base 118: mod_base = OTHER; note = 2'-O-methyluridine
  modified_base 119: mod_base = OTHER; note = 2'-O-methyluridine
  modified_base 120: mod_base = OTHER; note = 2'-O-methylcytidine
  modified_base 121: mod_base = OTHER; note = 2'-O-methyluridine phosphorothioate
  modified_base 122: mod_base = OTHER; note = 2'-O-methyluridine phosphorothioate
  modified_base 123: mod_base = OTHER; note = 2'-O-methyluridine phosphorothioate
  modified_base 124: mod_base = OTHER; note = 2'-O-methyluridine
gttctgtcttttggtcaggacaaccgtctagctataagtgctgcagggtgtgagaaactcctattgctggacgatgtctcttacgaggcattagcacaggtagtccatggacattaattctttt

SEQ ID NO: 8 - RNA, 124 nt, synthetic construct
  source 1..124: mol_type = other RNA; note = Description of Artificial Sequence: Synthetic polynucleotide
  modified_base 1: mod_base = OTHER; note = 2'-O-methylguanosine phosphorothioate
  modified_base 2: mod_base = OTHER; note = 2'-O-methyluridine phosphorothioate
  modified_base 121: mod_base = OTHER; note = Uridine phosphorothioate
  modified_base 122: mod_base = OTHER; note = 2'-O-methyluridine phosphorothioate
  modified_base 123: mod_base = OTHER; note = 2'-O-methyluridine phosphorothioate
  modified_base 124: mod_base = OTHER; note = 2'-O-methyluridine
gttctgtcttttggtcaggacaaccgtctagctataagtgctgcagggtgtgagaaactcctattgctggacgatgtctcttacgaggcattagcaccaaaaactcaacatatttgatcatttt

SEQ ID NO: 9 - RNA, 124 nt, synthetic construct
  source 1..124: mol_type = other RNA; note = Description of Artificial Sequence: Synthetic polynucleotide
  modified_base 1: mod_base = OTHER; note = 2'-O-methylguanosine phosphorothioate
  modified_base 2: mod_base = OTHER; note = 2'-O-methyluridine phosphorothioate
  modified_base 121: mod_base = OTHER; note = Uridine phosphorothioate
  modified_base 122: mod_base = OTHER; note = 2'-O-methyluridine phosphorothioate
  modified_base 123: mod_base = OTHER; note = 2'-O-methyluridine phosphorothioate
  modified_base 124: mod_base = OTHER; note = 2'-O-methyluridine
gttctgtcttttggtcaggacaaccgtctagctataagtgctgcagggtgtgagaaactcctattgctggacgatgtctcttacgaggcattagcactacttcaacaaaaagtgaaatattttt

SEQ ID NO: 10 - RNA, 124 nt, synthetic construct
  source 1..124: mol_type = other RNA; note = Description of Artificial Sequence: Synthetic polynucleotide
  modified_base 1: mod_base = OTHER; note = 2'-O-methylguanosine phosphorothioate
  modified_base 2: mod_base = OTHER; note = 2'-O-methyluridine phosphorothioate
  modified_base 121: mod_base = OTHER; note = Uridine phosphorothioate
  modified_base 122: mod_base = OTHER; note = 2'-O-methyluridine phosphorothioate
  modified_base 123: mod_base = OTHER; note = 2'-O-methyluridine phosphorothioate
  modified_base 124: mod_base = OTHER; note = 2'-O-methyluridine
gttctgtcttttggtcaggacaaccgtctagctataagtgctgcagggtgtgagaaactcctattgctggacgatgtctcttacgaggcattagcacagaagagcaactaactaacttaatttt

SEQ ID NO: 11 - RNA, 124 nt, synthetic construct
  source 1..124: mol_type = other RNA; note = Description of Artificial Sequence: Synthetic polynucleotide
  modified_base 1: mod_base = OTHER; note = 2'-O-methylguanosine phosphorothioate
  modified_base 2: mod_base = OTHER; note = 2'-O-methyluridine phosphorothioate
  modified_base 121: mod_base = OTHER; note = Uridine phosphorothioate
  modified_base 122: mod_base = OTHER; note = 2'-O-methyluridine phosphorothioate
  modified_base 123: mod_base = OTHER; note = 2'-O-methyluridine phosphorothioate
  modified_base 124: mod_base = OTHER; note = 2'-O-methyluridine
gttctgtcttttggtcaggacaaccgtctagctataagtgctgcagggtgtgagaaactcctattgctggacgatgtctcttacgaggcattagcactggaggaaataactagaggaacatttt

SEQ ID NO: 12 - RNA, 124 nt, synthetic construct
  source 1..124: mol_type = other RNA; note = Description of Artificial Sequence: Synthetic polynucleotide
  modified_base 1: mod_base = OTHER; note = 2'-O-methylguanosine phosphorothioate
  modified_base 2: mod_base = OTHER; note = 2'-O-methyluridine phosphorothioate
  modified_base 121: mod_base = OTHER; note = Uridine phosphorothioate
  modified_base 122: mod_base = OTHER; note = 2'-O-methyluridine phosphorothioate
  modified_base 123: mod_base = OTHER; note = 2'-O-methyluridine phosphorothioate
  modified_base 124: mod_base = OTHER; note = 2'-O-methyluridine
gttctgtcttttggtcaggacaaccgtctagctataagtgctgcagggtgtgagaaactcctattgctggacgatgtctcttacgaggcattagcacaagaacccacagaaatttctctatttt

SEQ ID NO: 13 - RNA, 124 nt, synthetic construct; identical to SEQ ID NO: 1
  source 1..124: mol_type = other RNA; note = Description of Artificial Sequence: Synthetic polynucleotide
  modified_base 1: mod_base = OTHER; note = 2'-O-methylguanosine phosphorothioate
  modified_base 2: mod_base = OTHER; note = 2'-O-methyluridine phosphorothioate
  modified_base 121: mod_base = OTHER; note = Uridine phosphorothioate
  modified_base 122: mod_base = OTHER; note = 2'-O-methyluridine phosphorothioate
  modified_base 123: mod_base = OTHER; note = 2'-O-methyluridine phosphorothioate
  modified_base 124: mod_base = OTHER; note = 2'-O-methyluridine

SEQ ID NO: 14 - RNA, 124 nt, synthetic construct; identical to SEQ ID NO: 7
  source 1..124: mol_type = other RNA; note = Description of Artificial Sequence: Synthetic polynucleotide
  modified_base 1: mod_base = OTHER; note = 2'-O-methylguanosine phosphorothioate
  modified_base 2: mod_base = OTHER; note = 2'-O-methyluridine phosphorothioate
  modified_base 121: mod_base = OTHER; note = Uridine phosphorothioate
  modified_base 122: mod_base = OTHER; note = 2'-O-methyluridine phosphorothioate
  modified_base 123: mod_base = OTHER; note = 2'-O-methyluridine phosphorothioate
  modified_base 124: mod_base = OTHER; note = 2'-O-methyluridine

SEQ ID NO: 15 - RNA, 124 nt, synthetic construct
  source 1..124: mol_type = other RNA; note = Description of Artificial Sequence: Synthetic polynucleotide
  modified_base 1: mod_base = OTHER; note = 2'-O-methylguanosine phosphorothioate
  modified_base 2: mod_base = OTHER; note = 2'-O-methyluridine phosphorothioate
  modified_base 121: mod_base = OTHER; note = Uridine phosphorothioate
  modified_base 122: mod_base = OTHER; note = 2'-O-methyluridine phosphorothioate
  modified_base 123: mod_base = OTHER; note = 2'-O-methyluridine phosphorothioate
  modified_base 124: mod_base = OTHER; note = 2'-O-methyluridine
gttctgtcttttggtcaggacaaccgtctagctataagtgctgcagggtgtgagaaactcctattgctggacgatgtctcttacgaggcattagcacctggcaatgtccccaatgcaatctttt

SEQ ID NO: 16 - RNA, 124 nt, synthetic construct
  source 1..124: mol_type = other RNA; note = Description of Artificial Sequence: Synthetic polynucleotide
  modified_base 1: mod_base = OTHER; note = 2'-O-methylguanosine phosphorothioate
  modified_base 2: mod_base = OTHER; note = 2'-O-methyluridine phosphorothioate
  modified_base 121: mod_base = OTHER; note = Uridine phosphorothioate
  modified_base 122: mod_base = OTHER; note = 2'-O-methyluridine phosphorothioate
  modified_base 123: mod_base = OTHER; note = 2'-O-methyluridine phosphorothioate
  modified_base 124: mod_base = OTHER; note = 2'-O-methyluridine
gttctgtcttttggtcaggacaaccgtctagctataagtgctgcagggtgtgagaaactcctattgctggacgatgtctcttacgaggcattagcaccattggggacattgccagtaatctttt

SEQ ID NO: 17 - RNA, 124 nt, synthetic construct
  source 1..124: mol_type = other RNA; note = Description of Artificial Sequence: Synthetic polynucleotide
  modified_base 1: mod_base = OTHER; note = 2'-O-methylguanosine phosphorothioate
  modified_base 2: mod_base = OTHER; note = 2'-O-methyluridine phosphorothioate
  modified_base 121: mod_base = OTHER; note = Uridine phosphorothioate
  modified_base 122: mod_base = OTHER; note = 2'-O-methyluridine phosphorothioate
  modified_base 123: mod_base = OTHER; note = 2'-O-methyluridine phosphorothioate
  modified_base 124: mod_base = OTHER; note = 2'-O-methyluridine
gttctgtcttttggtcaggacaaccgtctagctataagtgctgcagggtgtgagaaactcctattgctggacgatgtctcttacgaggcattagcaccccaagtaaaaagaatattcaattttt

SEQ ID NO: 18 - RNA, 124 nt, synthetic construct
  source 1..124: mol_type = other RNA; note = Description of Artificial Sequence: Synthetic polynucleotide
  modified_base 1: mod_base = OTHER; note = 2'-O-methylguanosine phosphorothioate
  modified_base 2: mod_base = OTHER; note = 2'-O-methyluridine phosphorothioate
  modified_base 121: mod_base = OTHER; note = Uridine phosphorothioate
  modified_base 122: mod_base = OTHER; note = 2'-O-methyluridine phosphorothioate
  modified_base 123: mod_base = OTHER; note = 2'-O-methyluridine phosphorothioate
  modified_base 124: mod_base = OTHER; note = 2'-O-methyluridine
gttctgtcttttggtcaggacaaccgtctagctataagtgctgcagggtgtgagaaactcctattgctggacgatgtctcttacgaggcattagcacaatataatgtttgttgtctttcctttt

SEQ ID NO: 19 - RNA, 124 nt, synthetic construct
  source 1..124: mol_type = other RNA; note = Description of Artificial Sequence: Synthetic polynucleotide
  modified_base 1: mod_base = OTHER; note = 2'-O-methylguanosine phosphorothioate
  modified_base 2: mod_base = OTHER; note = 2'-O-methyluridine phosphorothioate
  modified_base 121: mod_base = OTHER; note = Uridine phosphorothioate
  modified_base 122: mod_base = OTHER; note = 2'-O-methyluridine phosphorothioate
  modified_base 123: mod_base = OTHER; note = 2'-O-methyluridine phosphorothioate
  modified_base 124: mod_base = OTHER; note = 2'-O-methyluridine
gttctgtcttttggtcaggacaaccgtctagctataagtgctgcagggtgtgagaaactcctattgctggacgatgtctcttacgaggcattagcacgaagagcaactaactaacttaattttt

SEQ ID NO: 20 - RNA, 120 nt, synthetic construct; identical to SEQ ID NO: 2
  source 1..120: mol_type = other RNA; note = Description of Artificial Sequence: Synthetic polynucleotide
  modified_base 1: mod_base = OTHER; note = 2'-O-methylguanosine phosphorothioate
  modified_base 2: mod_base = OTHER; note = 2'-O-methyluridine phosphorothioate
  modified_base 117: mod_base = OTHER; note = 2'-O-methyluridine phosphorothioate
  modified_base 118: mod_base = OTHER; note = 2'-O-methyladenosine phosphorothioate
  modified_base 119: mod_base = OTHER; note = 2'-O-methyladenosine phosphorothioate
  modified_base 120: mod_base = OTHER; note = 2'-O-methyladenosine

SEQ ID NO: 21 - RNA, 123 nt, synthetic construct; identical to SEQ ID NO: 4
  source 1..123: mol_type = other RNA; note = Description of Artificial Sequence: Synthetic polynucleotide
  modified_base 1: mod_base = OTHER; note = 2'-O-methylguanosine phosphorothioate
  modified_base 2: mod_base = OTHER; note = 2'-O-methyluridine phosphorothioate
  modified_base 116: mod_base = OTHER; note = 2'-O-methyluridine
  modified_base 117: mod_base = OTHER; note = 2'-O-methyladenosine
  modified_base 118: mod_base = OTHER; note = 2'-O-methyladenosine
  modified_base 119: mod_base = OTHER; note = 2'-O-methyladenosine
  modified_base 120: mod_base = OTHER; note = 2'-O-methyluridine phosphorothioate
  modified_base 121: mod_base = OTHER; note = 2'-O-methyluridine phosphorothioate
  modified_base 122: mod_base = OTHER; note = 2'-O-methyluridine phosphorothioate
  modified_base 123: mod_base = OTHER; note = 2'-O-methyluridine

SEQ ID NO: 22 - RNA, 120 nt, synthetic construct; identical to SEQ ID NO: 5
  source 1..120: mol_type = other RNA; note = Description of Artificial Sequence: Synthetic polynucleotide
  modified_base 1: mod_base = OTHER; note = 2'-O-methylguanosine phosphorothioate
  modified_base 2: mod_base = OTHER; note = 2'-O-methyluridine phosphorothioate
  modified_base 117: mod_base = OTHER; note = 2'-O-methyladenosine phosphorothioate
  modified_base 118: mod_base = OTHER; note = 2'-O-methyluridine phosphorothioate
  modified_base 119: mod_base = OTHER; note = 2'-O-methyluridine phosphorothioate
  modified_base 120: mod_base = OTHER; note = 2'-O-methylcytidine

SEQ ID NO: 23 - RNA, 123 nt, synthetic construct; identical to SEQ ID NO: 6
  source 1..123: mol_type = other RNA; note = Description of Artificial Sequence: Synthetic polynucleotide
  modified_base 1: mod_base = OTHER; note = 2'-O-methylguanosine phosphorothioate
  modified_base 2: mod_base = OTHER; note = 2'-O-methyluridine phosphorothioate
  modified_base 4: mod_base = OTHER; note = 2'-O-methylcytidine
  modified_base 5: mod_base = OTHER; note = 2'-O-methyluridine
  modified_base 6: mod_base = OTHER; note = 2'-O-methylguanosine
  modified_base 7: mod_base = OTHER; note = 2'-O-methyluridine
  modified_base 11: mod_base = OTHER; note = 2'-O-methyluridine
  modified_base 16: mod_base = OTHER; note = 2'-O-methylcytidine
  modified_base 17: mod_base = OTHER; note = 2'-O-methyladenosine
  modified_base 18: mod_base = OTHER; note = 2'-O-methylguanosine
  modified_base 19: mod_base = OTHER; note = 2'-O-methylguanosine
  modified_base 20: mod_base = OTHER; note = 2'-O-methyladenosine
  modified_base 21: mod_base = OTHER; note = 2'-O-methylcytidine
  modified_base 25: mod_base = OTHER; note = 2'-O-methylcytidine
  modified_base 26: mod_base = OTHER; note = 2'-O-methylguanosine
  modified_base 27: mod_base = OTHER; note = 2'-O-methyluridine
  modified_base 28: mod_base = OTHER; note = 2'-O-methylcytidine
  modified_base 29: mod_base = OTHER; note = 2'-O-methyluridine
  modified_base 30: mod_base = OTHER; note = 2'-O-methyladenosine
  modified_base 31: mod_base = OTHER; note = 2'-O-methylguanosine
  modified_base 39: mod_base = OTHER; note = 2'-O-methyluridine
  modified_base 41: mod_base = OTHER; note = 2'-O-methyluridine
  modified_base 44: mod_base = OTHER; note = 2'-O-methyladenosine
  modified_base 45: mod_base = OTHER; note = 2'-O-methylguanosine
  modified_base 46: mod_base = OTHER; note = 2'-O-methylguanosine
  modified_base 47: mod_base = OTHER; note = 2'-O-methylguanosine
  modified_base 48: mod_base = OTHER; note = 2'-O-methyluridine
  modified_base 49: mod_base = OTHER; note = 2'-O-methylguanosine
  modified_base 50: mod_base = OTHER; note = 2'-O-methyluridine
  modified_base 51: mod_base = OTHER; note = 2'-O-methylguanosine
  modified_base 56: mod_base = OTHER; note = 2'-O-methyladenosine
  modified_base 57: mod_base = OTHER; note = 2'-O-methylcytidine
  modified_base 58: mod_base = OTHER; note = 2'-O-methyluridine
  modified_base 59: mod_base = OTHER; note = 2'-O-methylcytidine
  modified_base 60: mod_base = OTHER; note = 2'-O-methylcytidine
  modified_base 61: mod_base = OTHER; note = 2'-O-methyluridine
  modified_base 63: mod_base = OTHER; note = 2'-O-methyluridine
  modified_base 64: mod_base = OTHER; note = 2'-O-methyluridine
  modified_base 69: mod_base = OTHER; note = 2'-O-methylguanosine
  modified_base 70: mod_base = OTHER; note = 2'-O-methyladenosine
  modified_base 71: mod_base = OTHER; note = 2'-O-methylcytidine
  modified_base 72: mod_base = OTHER; note = 2'-O-methylguanosine
  modified_base 73: mod_base = OTHER; note = 2'-O-methyladenosine
  modified_base 74: mod_base = OTHER; note = 2'-O-methyluridine
  modified_base 75: mod_base = OTHER; note = 2'-O-methylguanosine
  modified_base 76: mod_base = OTHER; note = 2'-O-methyluridine
  modified_base 77: mod_base = OTHER; note = 2'-O-methylcytidine
  modified_base 78: mod_base = OTHER; note = 2'-O-methyluridine
  modified_base 79: mod_base = OTHER; note = 2'-O-methylcytidine
  modified_base 80: mod_base = OTHER; note = 2'-O-methyluridine
  modified_base 81: mod_base = OTHER; note = 2'-O-methyluridine
  modified_base 82: mod_base = OTHER; note = 2'-O-methyladenosine
  modified_base 83: mod_base = OTHER; note = 2'-O-methylcytidine
  modified_base 84: mod_base = OTHER; note = 2'-O-methylguanosine
  modified_base 85: mod_base = OTHER; note = 2'-O-methyladenosine
  modified_base 86: mod_base = OTHER; note = 2'-O-methylguanosine
  modified_base 120: mod_base = OTHER; note = 2'-O-methyluridine phosphorothioate
  modified_base 121: mod_base = OTHER; note = 2'-O-methyluridine phosphorothioate
  modified_base 122: mod_base = OTHER; note = 2'-O-methyluridine phosphorothioate
  modified_base 123: mod_base = OTHER; note = 2'-O-methyluridine

SEQ ID NO: 24 - RNA, 120 nt, synthetic construct; identical to SEQ ID NO: 2
  source 1..120: mol_type = other RNA; note = Description of Artificial Sequence: Synthetic polynucleotide
  modified_base 1: mod_base = OTHER; note = 2'-O-methylguanosine phosphorothioate
  modified_base 2: mod_base = OTHER; note = 2'-O-methyluridine phosphorothioate
  modified_base 3: mod_base = OTHER; note = 2'-O-methyluridine phosphorothioate
  modified_base 117: mod_base = OTHER; note = 2'-O-methyluridine
  modified_base 118: mod_base = OTHER; note = 2'-O-methyladenosine phosphorothioate
  modified_base 119: mod_base = OTHER; note = 2'-O-methyladenosine phosphorothioate
  modified_base 120: mod_base = OTHER; note = 2'-O-methyladenosine

SEQ ID NO: 25 - RNA, 124 nt, synthetic construct; identical to SEQ ID NO: 1
  source 1..124: mol_type = other RNA; note = Description of Artificial Sequence: Synthetic polynucleotide
  modified_base 1: mod_base = OTHER; note = 2'-O-methylguanosine phosphorothioate
  modified_base 2: mod_base = OTHER; note = 2'-O-methyluridine phosphorothioate
  modified_base 3: mod_base = OTHER; note = 2'-O-methyluridine phosphorothioate
  modified_base 121: mod_base = OTHER; note = 2'-O-methyluridine
  modified_base 122: mod_base = OTHER; note = 2'-O-methyluridine phosphorothioate
  modified_base 123: mod_base = OTHER; note = 2'-O-methyluridine phosphorothioate
  modified_base 124: mod_base = OTHER; note = 2'-O-methyluridine

SEQ ID NO: 26 - RNA, 123 nt, synthetic construct; identical to SEQ ID NO: 4
  source 1..123: mol_type = other RNA; note = Description of Artificial Sequence: Synthetic polynucleotide
  modified_base 1: mod_base = OTHER; note = 2'-O-methylguanosine phosphorothioate
  modified_base 2: mod_base = OTHER; note = 2'-O-methyluridine phosphorothioate
  modified_base 3: mod_base = OTHER; note = 2'-O-methyluridine phosphorothioate
  modified_base 116: mod_base = OTHER; note = 2'-O-methyluridine
  modified_base 117: mod_base = OTHER; note = 2'-O-methyladenosine
  modified_base 118: mod_base = OTHER; note = 2'-O-methyladenosine
  modified_base 119: mod_base = OTHER; note = 2'-O-methyladenosine
  modified_base 120: mod_base = OTHER; note = 2'-O-methyluridine
  modified_base 121: mod_base = OTHER; note = 2'-O-methyluridine phosphorothioate
  modified_base 122: mod_base = OTHER; note = 2'-O-methyluridine phosphorothioate
  modified_base 123: mod_base = OTHER; note = 2'-O-methyluridine

SEQ ID NO: 27 - RNA, 120 nt, synthetic construct; identical to SEQ ID NO: 5
  source 1..120: mol_type = other RNA; note = Description of Artificial Sequence: Synthetic polynucleotide
  modified_base 1: mod_base = OTHER; note = 2'-O-methylguanosine phosphorothioate
  modified_base 2: mod_base = OTHER; note = 2'-O-methyluridine phosphorothioate
  modified_base 3: mod_base = OTHER; note = 2'-O-methyluridine phosphorothioate
  modified_base 117: mod_base = OTHER; note = 2'-O-methyladenosine
  modified_base 118: mod_base = OTHER; note = 2'-O-methyluridine phosphorothioate
  modified_base 119: mod_base = OTHER; note = 2'-O-methyluridine phosphorothioate
  modified_base 120: mod_base = OTHER; note = 2'-O-methylcytidine

SEQ ID NO: 28 - RNA, 123 nt, synthetic construct; identical to SEQ ID NO: 6
  source 1..123: mol_type = other RNA; note = Description of Artificial Sequence: Synthetic polynucleotide
  modified_base 1: mod_base = OTHER; note = 2'-O-methylguanosine phosphorothioate
  modified_base 2: mod_base = OTHER; note = 2'-O-methyluridine phosphorothioate
  modified_base 3: mod_base = OTHER; note = 2'-O-methyluridine phosphorothioate
  modified_base 4: mod_base = OTHER; note = 2'-O-methylcytidine
  modified_base 5: mod_base = OTHER; note = 2'-O-methyluridine
  modified_base 6: mod_base = OTHER; note = 2'-O-methylguanosine
  modified_base 7: mod_base = OTHER; note = 2'-O-methyluridine
  modified_base 11: mod_base = OTHER; note = 2'-O-methyluridine
  modified_base 16: mod_base = OTHER; note = 2'-O-methylcytidine
  modified_base 17: mod_base = OTHER; note = 2'-O-methyladenosine
  modified_base 18: mod_base = OTHER; note = 2'-O-methylguanosine
  modified_base 19: mod_base = OTHER; note = 2'-O-methylguanosine
  modified_base 20: mod_base = OTHER; note = 2'-O-methyladenosine
  modified_base 21: mod_base = OTHER; note = 2'-O-methylcytidine
  modified_base 25: mod_base = OTHER; note = 2'-O-methylcytidine
  modified_base 26: mod_base = OTHER; note = 2'-O-methylguanosine
  modified_base 27: mod_base = OTHER; note = 2'-O-methyluridine
  modified_base 28: mod_base = OTHER; note = 2'-O-methylcytidine
  modified_base 29: mod_base = OTHER; note = 2'-O-methyluridine
  modified_base 30: mod_base = OTHER; note = 2'-O-methyladenosine
  modified_base 31: mod_base = OTHER; note = 2'-O-methylguanosine
  modified_base 39: mod_base = OTHER; note = 2'-O-methyluridine
  modified_base 41: mod_base = OTHER; note = 2'-O-methyluridine
  modified_base 44: mod_base = OTHER; note = 2'-O-methyladenosine
  modified_base 45: mod_base = OTHER; note = 2'-O-methylguanosine
  modified_base 46: mod_base = OTHER; note = 2'-O-methylguanosine
  modified_base 47: mod_base = OTHER; note = 2'-O-methylguanosine
  modified_base 48: mod_base = OTHER; note = 2'-O-methyluridine
  modified_base 49: mod_base = OTHER; note = 2'-O-methylguanosine
  modified_base 50: mod_base = OTHER; note = 2'-O-methyluridine
  modified_base 51: mod_base = OTHER; note = 2'-O-methylguanosine
  modified_base 56: mod_base = OTHER; note = 2'-O-methyladenosine
  modified_base 57: mod_base = OTHER; note = 2'-O-methylcytidine
  modified_base 58: mod_base = OTHER; note = 2'-O-methyluridine
  modified_base 59: mod_base = OTHER; note = 2'-O-methylcytidine
  modified_base 60: mod_base = OTHER; note = 2'-O-methylcytidine
  modified_base 61: mod_base = OTHER; note = 2'-O-methyluridine
  modified_base 63: mod_base = OTHER; note = 2'-O-methyluridine
  modified_base 64: mod_base = OTHER; note = 2'-O-methyluridine
  modified_base 69: mod_base = OTHER; note = 2'-O-methylguanosine
  modified_base 70: mod_base = OTHER; note = 2'-O-methyladenosine
  modified_base 71: mod_base = OTHER; note = 2'-O-methylcytidine
  modified_base 72: mod_base = OTHER; note = 2'-O-methylguanosine
  modified_base 73: mod_base = OTHER; note = 2'-O-methyladenosine
  modified_base 74: mod_base = OTHER; note = 2'-O-methyluridine
  modified_base 75: mod_base = OTHER; note = 2'-O-methylguanosine
  modified_base 76: mod_base = OTHER; note = 2'-O-methyluridine
  modified_base 77: mod_base = OTHER; note = 2'-O-methylcytidine
  modified_base 78: mod_base = OTHER; note = 2'-O-methyluridine
  modified_base 79: mod_base = OTHER; note = 2'-O-methylcytidine
  modified_base 80: mod_base = OTHER; note = 2'-O-methyluridine
  modified_base 81: mod_base = OTHER; note = 2'-O-methyluridine
  modified_base 82: mod_base = OTHER; note = 2'-O-methyladenosine
  modified_base 83: mod_base = OTHER; note = 2'-O-methylcytidine
  modified_base 84: mod_base = OTHER; note = 2'-O-methylguanosine
  modified_base 85: mod_base = OTHER; note = 2'-O-methyladenosine
  modified_base 86: mod_base = OTHER; note = 2'-O-methylguanosine
  modified_base 120: mod_base = OTHER; note = 2'-O-methyluridine
  modified_base 121: mod_base = OTHER; note = 2'-O-methyluridine phosphorothioate
  modified_base 122: mod_base = OTHER; note = 2'-O-methyluridine phosphorothioate
  modified_base 123: mod_base = OTHER; note = 2'-O-methyluridine

SEQ ID NO: 29 - RNA, 124 nt, synthetic construct; identical to SEQ ID NO: 7
  source 1..124: mol_type = other RNA; note = Description of Artificial Sequence: Synthetic polynucleotide
  modified_base 1: mod_base = OTHER; note = 2'-O-methylguanosine phosphorothioate
  modified_base 2: mod_base = OTHER; note = 2'-O-methyluridine phosphorothioate
  modified_base 3: mod_base = OTHER; note = 2'-O-methyluridine phosphorothioate
  modified_base 4: mod_base = OTHER; note = 2'-O-methylcytidine
  modified_base 5: mod_base = OTHER; note = 2'-O-methyluridine
  modified_base 6: mod_base = OTHER; note = 2'-O-methylguanosine
  modified_base 7: mod_base = OTHER; note = 2'-O-methyluridine
  modified_base 11: mod_base = OTHER; note = 2'-O-methyluridine
  modified_base 16: mod_base = OTHER; note = 2'-O-methylcytidine
  modified_base 17: mod_base = OTHER; note = 2'-O-methyladenosine
  modified_base 18: mod_base = OTHER; note = 2'-O-methylguanosine
  modified_base 19: mod_base = OTHER; note = 2'-O-methylguanosine
  modified_base 20: mod_base = OTHER; note = 2'-O-methyladenosine
  modified_base 21: mod_base = OTHER; note = 2'-O-methylcytidine
  modified_base 25: mod_base = OTHER; note = 2'-O-methylcytidine
  modified_base 26: mod_base = OTHER; note = 2'-O-methylguanosine
  modified_base 27: mod_base = OTHER; note = 2'-O-methyluridine
  modified_base 28: mod_base = OTHER; note = 2'-O-methylcytidine
  modified_base 29: mod_base = OTHER; note = 2'-O-methyluridine
  modified_base 30: mod_base = OTHER; note = 2'-O-methyladenosine
  modified_base 31: mod_base = OTHER; note = 2'-O-methylguanosine
  modified_base 39: mod_base = OTHER; note = 2'-O-methyluridine
  modified_base 42: mod_base = OTHER; note = 2'-O-methyluridine
  modified_base 45: mod_base = OTHER; note = 2'-O-methyladenosine
  modified_base 46: mod_base = OTHER; note = 2'-O-methylguanosine
  modified_base 47: mod_base = OTHER; note = 2'-O-methylguanosine
  modified_base 48: mod_base = OTHER; note = 2'-O-methylguanosine
  modified_base 49: mod_base = OTHER; note = 2'-O-methyluridine
  modified_base 50: mod_base = OTHER; note = 2'-O-methylguanosine
  modified_base 51: mod_base = OTHER; note = 2'-O-methyluridine
  modified_base 52: mod_base = OTHER; note = 2'-O-methylguanosine
  modified_base 57: mod_base = OTHER; note = 2'-O-methyladenosine
  modified_base 58: mod_base = OTHER; note = 2'-O-methylcytidine
  modified_base 59: mod_base = OTHER; note = 2'-O-methyluridine
  modified_base 60: mod_base = OTHER; note = 2'-O-methylcytidine
  modified_base 61: mod_base = OTHER; note = 2'-O-methylcytidine
  modified_base 62: mod_base = OTHER; note = 2'-O-methyluridine
  modified_base 64: mod_base = OTHER; note = 2'-O-methyluridine
  modified_base 65: mod_base = OTHER; note = 2'-O-methyluridine
  modified_base 70: mod_base = OTHER; note = 2'-O-methylguanosine
  modified_base 71: mod_base = OTHER; note = 2'-O-methyladenosine
  modified_base 72: mod_base = OTHER; note = 2'-O-methylcytidine
  modified_base 73: mod_base = OTHER; note = 2'-O-methylguanosine
  modified_base 74: mod_base = OTHER; note = 2'-O-methyladenosine
  modified_base 75: mod_base = OTHER; note = 2'-O-methyluridine
  modified_base 76: mod_base = OTHER; note = 2'-O-methylguanosine
  modified_base 77: mod_base = OTHER; note = 2'-O-methyluridine
  modified_base 78: mod_base = OTHER; note = 2'-O-methylcytidine
  modified_base 79: mod_base = OTHER; note = 2'-O-methyluridine
  modified_base 80: mod_base = OTHER; note = 2'-O-methylcytidine
  modified_base 81: mod_base = OTHER; note = 2'-O-methyluridine
  modified_base 82: mod_base = OTHER; note = 2'-O-methyluridine
  modified_base 83: mod_base = OTHER; note = 2'-O-methyladenosine
  modified_base 84: mod_base = OTHER; note = 2'-O-methylcytidine
  modified_base 85: mod_base = OTHER; note = 2'-O-methylguanosine
  modified_base 86: mod_base = OTHER; note = 2'-O-methyladenosine
  modified_base 87: mod_base = OTHER; note = 2'-O-methylguanosine
  modified_base 117: mod_base = OTHER; note = 2'-O-methyladenosine
  modified_base 118: mod_base = OTHER; note = 2'-O-methyluridine
  modified_base 119: mod_base = OTHER; note = 2'-O-methyluridine
  modified_base 120: mod_base = OTHER; note = 2'-O-methylcytidine
  modified_base 121: mod_base = OTHER; note = 2'-O-methyluridine
  modified_base 122: mod_base = OTHER; note = 2'-O-methyluridine phosphorothioate
  modified_base 123: mod_base = OTHER; note = 2'-O-methyluridine phosphorothioate
  modified_base 124: mod_base = OTHER; note = 2'-O-methyluridine

SEQ ID NO: 30 - RNA, 124 nt, synthetic construct; identical to SEQ ID NO: 8
  source 1..124: mol_type = other RNA; note = Description of Artificial Sequence: Synthetic polynucleotide
  modified_base 1: mod_base = OTHER; note = 2'-O-methylguanosine phosphorothioate
  modified_base 2: mod_base = OTHER; note = 2'-O-methyluridine phosphorothioate
  modified_base 122: mod_base = OTHER; note = 2'-O-methyluridine phosphorothioate
  modified_base 123: mod_base = OTHER; note = 2'-O-methyluridine phosphorothioate
  modified_base 124: mod_base = OTHER; note = 2'-O-methyluridine

SEQ ID NO: 31 - RNA, 124 nt, synthetic construct; identical to SEQ ID NO: 9
  source 1..124: mol_type = other RNA; note = Description of Artificial Sequence: Synthetic polynucleotide
  modified_base 1: mod_base = OTHER; note = 2'-O-methylguanosine phosphorothioate
  modified_base 2: mod_base = OTHER; note = 2'-O-methyluridine phosphorothioate
  modified_base 122: mod_base = OTHER; note = 2'-O-methyluridine phosphorothioate
  modified_base 123: mod_base = OTHER; note = 2'-O-methyluridine phosphorothioate
  modified_base 124: mod_base = OTHER; note = 2'-O-methyluridine

SEQ ID NO: 32 - RNA, 124 nt, synthetic construct; identical to SEQ ID NO: 10
  source 1..124: mol_type = other RNA; note = Description of Artificial Sequence: Synthetic polynucleotide
  modified_base 1: mod_base = OTHER; note = 2'-O-methylguanosine phosphorothioate
  modified_base 2: mod_base = OTHER; note = 2'-O-methyluridine phosphorothioate
  modified_base 122: mod_base = OTHER; note = 2'-O-methyluridine phosphorothioate
  modified_base 123: mod_base = OTHER; note = 2'-O-methyluridine phosphorothioate
  modified_base 124: mod_base = OTHER; note = 2'-O-methyluridine

SEQ ID NO: 33 - RNA, 124 nt, synthetic construct; identical to SEQ ID NO: 11
  source 1..124: mol_type = other RNA; note = Description of Artificial Sequence: Synthetic polynucleotide
  modified_base 1: mod_base = OTHER; note = 2'-O-methylguanosine phosphorothioate
  modified_base 2: mod_base = OTHER; note = 2'-O-methyluridine phosphorothioate
  modified_base 122: mod_base = OTHER; note = 2'-O-methyluridine phosphorothioate
  modified_base 123: mod_base = OTHER; note = 2'-O-methyluridine phosphorothioate
  modified_base 124: mod_base = OTHER; note = 2'-O-methyluridine

SEQ ID NO: 34 - RNA, 124 nt, synthetic construct; identical to SEQ ID NO: 12
  source 1..124: mol_type = other RNA; note = Description of Artificial Sequence: Synthetic polynucleotide
  modified_base 1: mod_base = OTHER; note = 2'-O-methylguanosine phosphorothioate
  modified_base 2: mod_base = OTHER; note = 2'-O-methyluridine phosphorothioate
  modified_base 122: mod_base = OTHER; note = 2'-O-methyluridine phosphorothioate
  modified_base 123: mod_base = OTHER; note = 2'-O-methyluridine phosphorothioate
  modified_base 124: mod_base = OTHER; note = 2'-O-methyluridine

SEQ ID NO: 35 - RNA, 124 nt, synthetic construct; identical to SEQ ID NO: 1
  source 1..124: mol_type = other RNA; note = Description of Artificial Sequence: Synthetic polynucleotide
  modified_base 1: mod_base = OTHER; note = 2'-O-methylguanosine phosphorothioate
  modified_base 2: mod_base = OTHER; note = 2'-O-methyluridine phosphorothioate
  modified_base 122: mod_base = OTHER; note = 2'-O-methyluridine phosphorothioate
  modified_base 123: mod_base = OTHER; note = 2'-O-methyluridine phosphorothioate
  modified_base 124: mod_base = OTHER; note = 2'-O-methyluridine

SEQ ID NO: 36 - RNA, 124 nt, synthetic construct; identical to SEQ ID NO: 7
  source 1..124: mol_type = other RNA; note = Description of Artificial Sequence: Synthetic polynucleotide
  modified_base 1: mod_base = OTHER; note = 2'-O-methylguanosine phosphorothioate
  modified_base 2: mod_base = OTHER; note = 2'-O-methyluridine phosphorothioate
  modified_base 122: mod_base = OTHER; note = 2'-O-methyluridine phosphorothioate
  modified_base 123: mod_base = OTHER; note = 2'-O-methyluridine phosphorothioate
  modified_base 124: mod_base = OTHER; note = 2'-O-methyluridine

SEQ ID NO: 37 - RNA, 124 nt, synthetic construct; identical to SEQ ID NO: 15
  source 1..124: mol_type = other RNA; note = Description of Artificial Sequence: Synthetic polynucleotide
  modified_base 1: mod_base = OTHER; note = 2'-O-methylguanosine phosphorothioate
  modified_base 2: mod_base = OTHER; note = 2'-O-methyluridine phosphorothioate
  modified_base 122: mod_base = OTHER; note = 2'-O-methyluridine phosphorothioate
  modified_base 123: mod_base = OTHER; note = 2'-O-methyluridine phosphorothioate
  modified_base 124: mod_base = OTHER; note = 2'-O-methyluridine

SEQ ID NO: 38 - RNA, 124 nt, synthetic construct; identical to SEQ ID NO: 16
  source 1..124: mol_type = other RNA; note = Description of Artificial Sequence: Synthetic polynucleotide
  modified_base 1: mod_base = OTHER; note = 2'-O-methylguanosine phosphorothioate
  modified_base 2: mod_base = OTHER; note = 2'-O-methyluridine phosphorothioate
  modified_base 122: mod_base = OTHER; note = 2'-O-methyluridine phosphorothioate
  modified_base 123: mod_base = OTHER; note = 2'-O-methyluridine phosphorothioate
  modified_base 124: mod_base = OTHER; note = 2'-O-methyluridine

SEQ ID NO: 39 - RNA, 124 nt, synthetic construct; identical to SEQ ID NO: 17
  source 1..124: mol_type = other RNA; note = Description of Artificial Sequence: Synthetic polynucleotide
  modified_base 1: mod_base = OTHER; note = 2'-O-methylguanosine phosphorothioate
  modified_base 2: mod_base = OTHER; note = 2'-O-methyluridine phosphorothioate
  modified_base 122: mod_base = OTHER; note = 2'-O-methyluridine phosphorothioate
  modified_base 123: mod_base = OTHER; note = 2'-O-methyluridine phosphorothioate
  modified_base 124: mod_base = OTHER; note = 2'-O-methyluridine

SEQ ID NO: 40 - RNA, 124 nt, synthetic construct; identical to SEQ ID NO: 18
  source 1..124: mol_type = other RNA; note = Description of Artificial Sequence: Synthetic polynucleotide
  modified_base 1: mod_base = OTHER; note = 2'-O-methylguanosine phosphorothioate
  modified_base 2: mod_base = OTHER; note = 2'-O-methyluridine phosphorothioate
  modified_base 122: mod_base = OTHER; note = 2'-O-methyluridine phosphorothioate
  modified_base 123: mod_base = OTHER; note = 2'-O-methyluridine phosphorothioate
  modified_base 124: mod_base = OTHER; note = 2'-O-methyluridine

SEQ ID NO: 41 - RNA, 124 nt, synthetic construct; identical to SEQ ID NO: 19
  source 1..124: mol_type = other RNA; note = Description of Artificial Sequence: Synthetic polynucleotide
  modified_base 1: mod_base = OTHER; note = 2'-O-methylguanosine phosphorothioate
  modified_base 2: mod_base = OTHER; note = 2'-O-methyluridine phosphorothioate
  modified_base 122: mod_base = OTHER; note = 2'-O-methyluridine phosphorothioate
  modified_base 123: mod_base = OTHER; note = 2'-O-methyluridine phosphorothioate
  modified_base 124: mod_base = OTHER; note = 2'-O-methyluridine

SEQ ID NO: 42 - RNA, 120 nt, synthetic construct; identical to SEQ ID NO: 2
  source 1..120: mol_type = other RNA; note = Description of Artificial Sequence: Synthetic polynucleotide
  modified_base 1: mod_base = OTHER; note = 2'-O-methylguanosine phosphorothioate
  modified_base 2: mod_base = OTHER; note = 2'-O-methyluridine phosphorothioate
  modified_base 117: mod_base = OTHER; note = 2'-O-methyluridine
  modified_base 118: mod_base = OTHER; note = 2'-O-methyladenosine phosphorothioate
  modified_base 119: mod_base = OTHER; note = 2'-O-methyladenosine phosphorothioate
  modified_base 120: mod_base = OTHER; note = 2'-O-methyladenosine

SEQ ID NO: 43 - RNA, 123 nt, synthetic construct; identical to SEQ ID NO: 4
  source 1..123: mol_type = other RNA; note = Description of Artificial Sequence: Synthetic polynucleotide
  modified_base 1: mod_base = OTHER; note = 2'-O-methylguanosine phosphorothioate
  modified_base 2: mod_base = OTHER; note = 2'-O-methyluridine phosphorothioate
  modified_base 116: mod_base = OTHER; note = 2'-O-methyluridine
  modified_base 117: mod_base = OTHER; note = 2'-O-methyladenosine
  modified_base 118: mod_base = OTHER; note = 2'-O-methyladenosine
  modified_base 119: mod_base = OTHER; note = 2'-O-methyladenosine
  modified_base 120: mod_base = OTHER; note = 2'-O-methyluridine
  modified_base 121: mod_base = OTHER; note = 2'-O-methyluridine phosphorothioate
  modified_base 122: mod_base = OTHER; note = 2'-O-methyluridine phosphorothioate
  modified_base 123: mod_base = OTHER; note = 2'-O-methyluridine

SEQ ID NO: 44 - RNA, 120 nt, synthetic construct; identical to SEQ ID NO: 5
  source 1..120: mol_type = other RNA; note = Description of Artificial Sequence: Synthetic polynucleotide
  modified_base 1: mod_base = OTHER; note = 2'-O-methylguanosine phosphorothioate
  modified_base 2: mod_base = OTHER; note = 2'-O-methyluridine phosphorothioate
  modified_base 117: mod_base = OTHER; note = 2'-O-methyladenosine
  modified_base 118: mod_base = OTHER; note = 2'-O-methyluridine phosphorothioate
  modified_base 119: mod_base = OTHER; note = 2'-O-methyluridine phosphorothioate
  modified_base 120: mod_base = OTHER; note = 2'-O-methylcytidine

SEQ ID NO: 45 - RNA, 123 nt, synthetic construct; identical to SEQ ID NO: 6
  source 1..123: mol_type = other RNA; note = Description of Artificial Sequence: Synthetic polynucleotide
  modified_base 1: mod_base = OTHER; note = 2'-O-methylguanosine phosphorothioate
  modified_base 2: mod_base = OTHER; note = 2'-O-methyluridine phosphorothioate
  modified_base 4: mod_base = OTHER; note = 2'-O-methylcytidine
  modified_base 5: mod_base = OTHER; note = 2'-O-methyluridine
  modified_base 6: mod_base = OTHER; note = 2'-O-methylguanosine
  modified_base 7: mod_base = OTHER; note = 2'-O-methyluridine
  modified_base 11: mod_base = OTHER; note = 2'-O-methyluridine
  modified_base 16: mod_base = OTHER; note = 2'-O-methylcytidine
  modified_base 17: mod_base = OTHER; note = 2'-O-methyladenosine
  modified_base 18: mod_base = OTHER; note = 2'-O-methylguanosine
  modified_base 19: mod_base = OTHER; note = 2'-O-methylguanosine
  modified_base 20: mod_base = OTHER; note = 2'-O-methyladenosine
  modified_base 21: mod_base = OTHER; note = 2'-O-methylcytidine
  modified_base 25: mod_base = OTHER; note = 2'-O-methylcytidine
  modified_base 26: mod_base = OTHER; note = 2'-O-methylguanosine
  modified_base 27: mod_base = OTHER; note = 2'-O-methyluridine
  modified_base 28: mod_base = OTHER; note = 2'-O-methylcytidine
  modified_base 29: mod_base = OTHER; note = 2'-O-methyluridine
  modified_base 30: mod_base = OTHER; note = 2'-O-methyladenosine
  modified_base 31: mod_base = OTHER; note = 2'-O-methylguanosine
  modified_base 39: mod_base = OTHER; note = 2'-O-methyluridine
  modified_base 41: mod_base = OTHER; note = 2'-O-methyluridine
  modified_base 44: mod_base = OTHER; note = 2'-O-methyladenosine
  modified_base 45: mod_base = OTHER; note = 2'-O-methylguanosine
  modified_base 46: mod_base = OTHER; note = 2'-O-methylguanosine
  modified_base 47: mod_base = OTHER; note = 2'-O-methylguanosine
  modified_base 48: mod_base = OTHER; note = 2'-O-methyluridine
  modified_base 49: mod_base = OTHER; note = 2'-O-methylguanosine
  modified_base 50: mod_base = OTHER; note = 2'-O-methyluridine
  modified_base 51: mod_base = OTHER; note = 2'-O-methylguanosine
  modified_base 56: mod_base = OTHER; note = 2'-O-methyladenosine
  modified_base 57: mod_base = OTHER; note = 2'-O-methylcytidine
  modified_base 58: mod_base = OTHER; note = 2'-O-methyluridine
  modified_base 59: mod_base = OTHER; note = 2'-O-methylcytidine
  modified_base 60: mod_base = OTHER; note = 2'-O-methylcytidine
  modified_base 61: mod_base = OTHER; note = 2'-O-methyluridine
  modified_base 63: mod_base = OTHER; note = 2'-O-methyluridine
  modified_base 64: mod_base = OTHER; note = 2'-O-methyluridine
  modified_base 69: mod_base = OTHER; note = 2'-O-methylguanosine
  modified_base 70: mod_base = OTHER; note = 2'-O-methyladenosine
  modified_base 71: mod_base = OTHER; note = 2'-O-methylcytidine
  modified_base 72: mod_base = OTHER; note = 2'-O-methylguanosine
  modified_base 73: mod_base = OTHER; note = 2'-O-methyladenosine
  modified_base 74: mod_base = OTHER; note = 2'-O-methyluridine
  modified_base 75: mod_base = OTHER; note = 2'-O-methylguanosine
  modified_base 76: mod_base = OTHER; note = 2'-O-methyluridine
  modified_base 77: mod_base = OTHER; note = 2'-O-methylcytidine
  modified_base 78: mod_base = OTHER; note = 2'-O-methyluridine
  modified_base 79: mod_base = OTHER; note = 2'-O-methylcytidine
  modified_base 80: mod_base = OTHER; note = 2'-O-methyluridine
  modified_base 81: mod_base = OTHER; note = 2'-O-methyluridine
  modified_base 82: mod_base = OTHER; note = 2'-O-methyladenosine
  modified_base 83: mod_base = OTHER; note = 2'-O-methylcytidine
  modified_base 84: mod_base = OTHER; note = 2'-O-methylguanosine
  modified_base 85: mod_base = OTHER; note = 2'-O-methyladenosine
  modified_base 86: mod_base = OTHER; note = 2'-O-methylguanosine
  modified_base 120: mod_base = OTHER; note = 2'-O-methyluridine
  modified_base 121: mod_base = OTHER; note = 2'-O-methyluridine phosphorothioate
  modified_base 122: mod_base = OTHER; note = 2'-O-methyluridine phosphorothioate
  modified_base 123: mod_base = OTHER; note = 2'-O-methyluridine

SEQ ID NO: 46 - RNA, 120 nt, synthetic construct
  source 1..120: mol_type = other RNA; note = Description of Artificial Sequence: Synthetic polynucleotide
  modified_base 1: mod_base = OTHER; note = 2'-O-methylguanosine phosphorothioate
  modified_base 2: mod_base = OTHER; note = 2'-O-methyluridine phosphorothioate
  modified_base 3: mod_base = OTHER; note = 2'-O-methyluridine phosphorothioate
  modified_base 5: mod_base = OTHER; note = 2'-O-methyluridine
  modified_base 16: mod_base = OTHER; note = 2'-O-methylcytidine
  modified_base 21: mod_base = OTHER; note = 2'-O-methylcytidine
  modified_base 22: mod_base = OTHER; note = Nebularine
  modified_base 25: mod_base = OTHER; note = 2'-O-methylcytidine
  modified_base 26: mod_base = OTHER; note = 2'-O-methylguanosine
  modified_base 29: mod_base = OTHER; note = 2'-O-methyluridine
  modified_base 30: mod_base = OTHER; note = 2'-O-methyladenosine
  modified_base 44: mod_base = OTHER; note = 2'-O-methylcytidine
  modified_base 45: mod_base = OTHER; note = 2'-O-methyladenosine
  modified_base 49: mod_base = OTHER; note = 2'-O-methyluridine
  modified_base 50: mod_base = OTHER; note = 2'-O-methylguanosine
  modified_base 62: mod_base = OTHER; note = 2'-O-methyluridine
  modified_base 63: mod_base = OTHER; note = 2'-O-methyladenosine
  modified_base 67: mod_base = OTHER; note = 2'-O-methylcytidine
  modified_base 68: mod_base = OTHER; note = 2'-O-methyluridine
  modified_base 69: mod_base = OTHER; note = 2'-O-methylguanosine
  modified_base 72: mod_base = OTHER; note = 2'-O-methylcytidine
  modified_base 75: mod_base = OTHER; note = 2'-O-methyluridine
  modified_base 76: mod_base = OTHER; note = 2'-O-methylguanosine
  modified_base 79: mod_base = OTHER; note = 2'-O-methyluridine
  modified_base 82: mod_base = OTHER; note = 2'-O-methyluridine
  modified_base 83: mod_base = OTHER; note = 2'-O-methyladenosine
  modified_base 84: mod_base = OTHER; note = 2'-O-methylcytidine
  modified_base 117: mod_base = OTHER; note = 2'-O-methyluridine phosphorothioate
  modified_base 118: mod_base = OTHER; note = 2'-O-methyladenosine phosphorothioate
  modified_base 119: mod_base = OTHER; note = 2'-O-methyladenosine phosphorothioate
  modified_base 120: mod_base = OTHER; note = 2'-O-methyladenosine
gttctgtcttttggtcaggacnaccgtctagctataagtgctgcagggtgtgagaaactcctattgctggacgatgtctcttacgaggcattagcacaaccaacagcatagtcaaataaa

SEQ ID NO: 47 - RNA, 120 nt, synthetic construct
  source 1..120: mol_type = other RNA; note = Description of Artificial Sequence: Synthetic polynucleotide
  modified_base 1: mod_base = OTHER; note = 2'-O-methylguanosine phosphorothioate
  modified_base 2: mod_base = OTHER; note = 2'-O-methyluridine phosphorothioate
  modified_base 3: mod_base = OTHER; note = 2'-O-methyluridine phosphorothioate
  modified_base 5: mod_base = OTHER; note = 2'-O-methyluridine
  modified_base 16: mod_base = OTHER; note = 2'-O-methylcytidine
  modified_base 21: mod_base = OTHER; note = 2'-O-methylcytidine
  modified_base 23: mod_base = OTHER; note = Nebularine
  modified_base 25: mod_base = OTHER; note = 2'-O-methylcytidine
  modified_base 26: mod_base = OTHER; note = 2'-O-methylguanosine
  modified_base 29: mod_base = OTHER; note = 2'-O-methyluridine
  modified_base 30: mod_base = OTHER; note = 2'-O-methyladenosine
  modified_base 44: mod_base = OTHER; note = 2'-O-methylcytidine
  modified_base 45: mod_base = OTHER; note = 2'-O-methyladenosine
  modified_base 49: mod_base = OTHER; note = 2'-O-methyluridine
  modified_base 50: mod_base = OTHER; note = 2'-O-methylguanosine
  modified_base 62: mod_base = OTHER; note = 2'-O-methyluridine
  modified_base 63: mod_base = OTHER; note = 2'-O-methyladenosine
  modified_base 67: mod_base = OTHER; note = 2'-O-methylcytidine
  modified_base 68: mod_base = OTHER; note = 2'-O-methyluridine
  modified_base 69: mod_base = OTHER; note = 2'-O-methylguanosine
  modified_base 72: mod_base = OTHER; note = 2'-O-methylcytidine
  modified_base 75: mod_base = OTHER; note = 2'-O-methyluridine
  modified_base 76: mod_base = OTHER; note = 2'-O-methylguanosine
  modified_base 79: mod_base = OTHER; note = 2'-O-methyluridine
  modified_base 82: mod_base = OTHER; note = 2'-O-methyluridine
  modified_base 83: mod_base = OTHER; note = 2'-O-methyladenosine
  modified_base 84: mod_base = OTHER; note = 2'-O-methylcytidine
  modified_base 117: mod_base = OTHER; note = 2'-O-methyluridine phosphorothioate
  modified_base 118: mod_base = OTHER; note = 2'-O-methyladenosine phosphorothioate
  modified_base 119: mod_base = OTHER; note = 2'-O-methyladenosine phosphorothioate
  modified_base 120: mod_base = OTHER; note = 2'-O-methyladenosine
gttctgtcttttggtcaggacanccgtctagctataagtgctgcagggtgtgagaaactcctattgctggacgatgtctcttacgaggcattagcacaaccaacagcatagtcaaataaa

SEQ ID NO: 48 - RNA, 120 nt, synthetic construct
  source 1..120: mol_type = other RNA; note = Description of Artificial Sequence: Synthetic polynucleotide
  modified_base 1: mod_base = OTHER; note = 2'-O-methylguanosine phosphorothioate
  modified_base 2: mod_base = OTHER; note = 2'-O-methyluridine phosphorothioate
  modified_base 3: mod_base = OTHER; note = 2'-O-methyluridine phosphorothioate
  modified_base 5: mod_base = OTHER; note = 2'-O-methyluridine
  modified_base 16: mod_base = OTHER; note = 2'-O-methylcytidine
  modified_base 21: mod_base = OTHER; note = 2'-O-methylcytidine
  modified_base 25: mod_base = OTHER; note = 2'-O-methylcytidine
  modified_base 26: mod_base = OTHER; note = 2'-O-methylguanosine
  modified_base 29: mod_base = OTHER; note = 2'-O-methyluridine
  modified_base 30: mod_base = OTHER; note = 2'-O-methyladenosine
  modified_base 34: mod_base = OTHER; note = Nebularine
  modified_base 44: mod_base = OTHER; note = 2'-O-methylcytidine
  modified_base 45: mod_base = OTHER; note = 2'-O-methyladenosine
  modified_base 49: mod_base = OTHER; note = 2'-O-methyluridine
  modified_base 50: mod_base = OTHER; note = 2'-O-methylguanosine
  modified_base 62: mod_base = OTHER; note = 2'-O-methyluridine
  modified_base 63: mod_base = OTHER; note = 2'-O-methyladenosine
  modified_base 67: mod_base = OTHER; note = 2'-O-methylcytidine
  modified_base 68: mod_base = OTHER; note = 2'-O-methyluridine
  modified_base 69: mod_base = OTHER; note = 2'-O-methylguanosine
  modified_base 72: mod_base = OTHER; note = 2'-O-methylcytidine
  modified_base 75: mod_base = OTHER; note = 2'-O-methyluridine
  modified_base 76: mod_base = OTHER; note = 2'-O-methylguanosine
  modified_base 79: mod_base = OTHER; note = 2'-O-methyluridine
  modified_base 82: mod_base = OTHER; note = 2'-O-methyluridine
  modified_base 83: mod_base = OTHER; note = 2'-O-methyladenosine
  modified_base 84: mod_base = OTHER; note = 2'-O-methylcytidine
  modified_base 117: mod_base = OTHER; note = 2'-O-methyluridine phosphorothioate
  modified_base 118: mod_base = OTHER; note = 2'-O-methyladenosine phosphorothioate
  modified_base 119: mod_base = OTHER; note = 2'-O-methyladenosine phosphorothioate
  modified_base 120: mod_base = OTHER; note = 2'-O-methyladenosine
gttctgtcttttggtcaggacaaccgtctagctntaagtgctgcagggtgtgagaaactcctattgctggacgatgtctcttacgaggcattagcacaaccaacagcatagtcaaataaa

SEQ ID NO: 49 - RNA, 120 nt, synthetic construct
  source 1..120: mol_type = other RNA; note = Description of Artificial Sequence: Synthetic polynucleotide
  modified_base 1: mod_base = OTHER; note = 2'-O-methylguanosine phosphorothioate
  modified_base 2: mod_base = OTHER; note = 2'-O-methyluridine phosphorothioate
  modified_base 3: mod_base = OTHER; note = 2'-O-methyluridine phosphorothioate
  modified_base 5: mod_base = OTHER; note = 2'-O-methyluridine
  modified_base 16: mod_base = OTHER; note = 2'-O-methylcytidine
  modified_base 21: mod_base = OTHER; note = 2'-O-methylcytidine
  modified_base 25: mod_base = OTHER; note = 2'-O-methylcytidine
  modified_base 26: mod_base = OTHER; note = 2'-O-methylguanosine
  modified_base 29: mod_base = OTHER; note = 2'-O-methyluridine
  modified_base 30: mod_base = OTHER; note = 2'-O-methyladenosine
  modified_base 36: mod_base = OTHER; note = Nebularine
  modified_base 44: mod_base = OTHER; note = 2'-O-methylcytidine
  modified_base 45: mod_base = OTHER; note = 2'-O-methyladenosine
  modified_base 49: mod_base = OTHER; note = 2'-O-methyluridine
  modified_base 50: mod_base = OTHER; note = 2'-O-methylguanosine
  modified_base 62: mod_base = OTHER; note = 2'-O-methyluridine
  modified_base 63: mod_base = OTHER; note = 2'-O-methyladenosine
  modified_base 67: mod_base = OTHER; note = 2'-O-methylcytidine
  modified_base 68: mod_base = OTHER; note = 2'-O-methyluridine
  modified_base 69: mod_base = OTHER; note = 2'-O-methylguanosine
  modified_base 72: mod_base = OTHER; note = 2'-O-methylcytidine
  modified_base 75: mod_base = OTHER; note = 2'-O-methyluridine
  modified_base 76: mod_base = OTHER; note = 2'-O-methylguanosine
  modified_base 79: mod_base = OTHER; note = 2'-O-methyluridine
  modified_base 82: mod_base = OTHER; note = 2'-O-methyluridine
  modified_base 83: mod_base = OTHER; note = 2'-O-methyladenosine
  modified_base 84: mod_base = OTHER; note = 2'-O-methylcytidine
  modified_base 117: mod_base = OTHER; note = 2'-O-methyluridine phosphorothioate
  modified_base 118: mod_base = OTHER; note = 2'-O-methyladenosine phosphorothioate
  modified_base 119: mod_base = OTHER; note = 2'-O-methyladenosine phosphorothioate
  modified_base 120: mod_base = OTHER; note = 2'-O-methyladenosine
gttctgtcttttggtcaggacaaccgtctagctatnagtgctgcagggtgtgagaaactcctattgctggacgatgtctcttacgaggcattagcacaaccaacagcatagtcaaataaa

SEQ ID NO: 50 - RNA, 120 nt, synthetic construct
  source 1..120: mol_type = other RNA; note = Description of Artificial Sequence: Synthetic polynucleotide
  modified_base 1: mod_base = OTHER; note = 2'-O-methylguanosine phosphorothioate
  modified_base 2: mod_base = OTHER; note = 2'-O-methyluridine phosphorothioate
  modified_base 3: mod_base = OTHER; note = 2'-O-methyluridine phosphorothioate
  modified_base 5: mod_base = OTHER; note = 2'-O-methyluridine
  modified_base 16: mod_base = OTHER; note = 2'-O-methylcytidine
  modified_base 21: mod_base = OTHER; note = 2'-O-methylcytidine
  modified_base 25: mod_base = OTHER; note = 2'-O-methylcytidine
  modified_base 26: mod_base = OTHER; note = 2'-O-methylguanosine
  modified_base 29: mod_base = OTHER; note = 2'-O-methyluridine
  modified_base 30: mod_base = OTHER; note = 2'-O-methyladenosine
  modified_base 37: mod_base = OTHER; note = Nebularine
  modified_base 44: mod_base = OTHER; note = 2'-O-methylcytidine
  modified_base 45: mod_base = OTHER; note = 2'-O-methyladenosine
  modified_base 49: mod_base = OTHER; note = 2'-O-methyluridine
  modified_base 50: mod_base = OTHER; note = 2'-O-methylguanosine
  modified_base 62: mod_base = OTHER; note = 2'-O-methyluridine
  modified_base 63: mod_base = OTHER; note = 2'-O-methyladenosine
  modified_base 67: mod_base = OTHER; note = 2'-O-methylcytidine
  modified_base 68: mod_base = OTHER; note = 2'-O-methyluridine
  modified_base 69: mod_base = OTHER; note = 2'-O-methylguanosine
  modified_base 72: mod_base = OTHER; note = 2'-O-methylcytidine
  modified_base 75: mod_base = OTHER; note = 2'-O-methyluridine
  modified_base 76: mod_base = OTHER; note = 2'-O-methylguanosine
  modified_base 79: mod_base = OTHER; note = 2'-O-methyluridine
  modified_base 82: mod_base = OTHER; note = 2'-O-methyluridine
  modified_base 83: mod_base = OTHER; note = 2'-O-methyladenosine
  modified_base 84: mod_base = OTHER; note = 2'-O-methylcytidine
  modified_base 117: mod_base = OTHER; note = 2'-O-methyluridine phosphorothioate
  modified_base 118: mod_base = OTHER; note = 2'-O-methyladenosine phosphorothioate
  modified_base 119: mod_base = OTHER; note = 2'-O-methyladenosine phosphorothioate
  modified_base 120: mod_base = OTHER; note = 2'-O-methyladenosine
gttctgtcttttggtcaggacaaccgtctagctatangtgctgcagggtgtgagaaactcctattgctggacgatgtctcttacgaggcattagcacaaccaacagcatagtcaaataaa

SEQ ID NO: 51 - RNA, 120 nt, synthetic construct
  source 1..120: mol_type = other RNA; note = Description of Artificial Sequence: Synthetic polynucleotide
  modified_base 1: mod_base = OTHER; note = 2'-O-methylguanosine phosphorothioate
  modified_base 2: mod_base = OTHER; note = 2'-O-methyluridine phosphorothioate
  modified_base 3: mod_base = OTHER; note = 2'-O-methyluridine phosphorothioate
  modified_base 5: mod_base = OTHER; note = 2'-O-methyluridine
  modified_base 16: mod_base = OTHER; note = 2'-O-methylcytidine
  modified_base 21: mod_base = OTHER; note = 2'-O-methylcytidine
  modified_base 25: mod_base = OTHER; note = 2'-O-methylcytidine
  modified_base 26: mod_base = OTHER; note = 2'-O-methylguanosine
  modified_base 29: mod_base = OTHER; note = 2'-O-methyluridine
  modified_base 30: mod_base = OTHER; note = 2'-O-methyladenosine
  modified_base 44: mod_base = OTHER; note = 2'-O-methylcytidine
  modified_base 45: mod_base = OTHER; note = 2'-O-methyladenosine
  modified_base 49: mod_base = OTHER; note = 2'-O-methyluridine
  modified_base 50: mod_base = OTHER; note = 2'-O-methylguanosine
  modified_base 53: mod_base = OTHER; note = Nebularine
  modified_base 62: mod_base = OTHER; note = 2'-O-methyluridine
  modified_base 63: mod_base = OTHER; note = 2'-O-methyladenosine
  modified_base 67: mod_base = OTHER; note = 2'-O-methylcytidine
  modified_base 68: mod_base = OTHER; note = 2'-O-methyluridine
  modified_base 69: mod_base = OTHER; note = 2'-O-methylguanosine
  modified_base 72: mod_base = OTHER; note = 2'-O-methylcytidine
  modified_base 75: mod_base = OTHER; note = 2'-O-methyluridine
  modified_base 76: mod_base = OTHER; note = 2'-O-methylguanosine
  modified_base 79: mod_base = OTHER; note = 2'-O-methyluridine
  modified_base 82: mod_base = OTHER; note = 2'-O-methyluridine
  modified_base 83: mod_base = OTHER; note = 2'-O-methyladenosine
  modified_base 84: mod_base = OTHER; note = 2'-O-methylcytidine
  modified_base 117: mod_base = OTHER; note = 2'-O-methyluridine phosphorothioate
  modified_base 118: mod_base = OTHER; note = 2'-O-methyladenosine phosphorothioate
  modified_base 119: mod_base = OTHER; note = 2'-O-methyladenosine phosphorothioate
  modified_base 120: mod_base = OTHER; note = 2'-O-methyladenosine
gttctgtcttttggtcaggacaaccgtctagctataagtgctgcagggtgtgngaaactcctattgctggacgatgtctcttacgaggcattagcacaaccaacagcatagtcaaataaa

SEQ ID NO: 52 - RNA, 120 nt, synthetic construct
  source 1..120: mol_type = other RNA; note = Description of Artificial Sequence: Synthetic polynucleotide
  modified_base 1: mod_base = OTHER; note = 2'-O-methylguanosine phosphorothioate
  modified_base 2: mod_base = OTHER; note = 2'-O-methyluridine phosphorothioate
  modified_base 3: mod_base = OTHER; note = 2'-O-methyluridine phosphorothioate
  modified_base 5: mod_base = OTHER; note = 2'-O-methyluridine
  modified_base 16: mod_base = OTHER; note = 2'-O-methylcytidine
  modified_base 21: mod_base = OTHER; note = 2'-O-methylcytidine
  modified_base 25: mod_base = OTHER; note = 2'-O-methylcytidine
  modified_base 26: mod_base = OTHER; note = 2'-O-methylguanosine
  modified_base 29: mod_base = OTHER; note = 2'-O-methyluridine
  modified_base 30: mod_base = OTHER; note = 2'-O-methyladenosine
  modified_base 44: mod_base = OTHER; note = 2'-O-methylcytidine
  modified_base 45: mod_base = OTHER; note = 2'-O-methyladenosine
  modified_base 49: mod_base = OTHER; note = 2'-O-methyluridine
  modified_base 50: mod_base = OTHER; note = 2'-O-methylguanosine
  modified_base 55: mod_base = OTHER; note = Nebularine
  modified_base 62: mod_base = OTHER; note = 2'-O-methyluridine
  modified_base 63: mod_base = OTHER; note = 2'-O-methyladenosine
  modified_base 67: mod_base = OTHER; note = 2'-O-methylcytidine
  modified_base 68: mod_base = OTHER; note = 2'-O-methyluridine
  modified_base 69: mod_base = OTHER; note = 2'-O-methylguanosine
  modified_base 72: mod_base = OTHER; note = 2'-O-methylcytidine
  modified_base 75: mod_base = OTHER; note = 2'-O-methyluridine
  modified_base 76: mod_base = OTHER; note = 2'-O-methylguanosine
  modified_base 79: mod_base = OTHER; note = 2'-O-methyluridine
  modified_base 82: mod_base = OTHER; note = 2'-O-methyluridine
  modified_base 83: mod_base = OTHER; note = 2'-O-methyladenosine
  modified_base 84: mod_base = OTHER; note = 2'-O-methylcytidine
  modified_base 117: mod_base = OTHER; note = 2'-O-methyluridine phosphorothioate
  modified_base 118: mod_base = OTHER; note = 2'-O-methyladenosine phosphorothioate
  modified_base 119: mod_base = OTHER; note = 2'-O-methyladenosine phosphorothioate
  modified_base 120: mod_base = OTHER; note = 2'-O-methyladenosine
gttctgtcttttggtcaggacaaccgtctagctataagtgctgcagggtgtgagnaactcctattgctggacgatgtctcttacgaggcattagcacaaccaacagcatagtcaaataaa

SEQ ID NO: 53 - RNA, 120 nt, synthetic construct
  source 1..120: mol_type = other RNA; note = Description of Artificial Sequence: Synthetic polynucleotide
  modified_base 1: mod_base = OTHER; note = 2'-O-methylguanosine phosphorothioate
  modified_base 2: mod_base = OTHER; note = 2'-O-methyluridine phosphorothioate
  modified_base 3: mod_base = OTHER; note = 2'-O-methyluridine phosphorothioate
  modified_base 5: mod_base = OTHER; note = 2'-O-methyluridine
  modified_base 16: mod_base = OTHER; note = 2'-O-methylcytidine
  modified_base 21: mod_base = OTHER; note = 2'-O-methylcytidine
  modified_base 25: mod_base = OTHER; note = 2'-O-methylcytidine
  modified_base 26: mod_base = OTHER; note = 2'-O-methylguanosine
  modified_base 29: mod_base = OTHER; note = 2'-O-methyluridine
  modified_base 30: mod_base = OTHER; note = 2'-O-methyladenosine
  modified_base 44: mod_base = OTHER; note = 2'-O-methylcytidine
  modified_base 45: mod_base = OTHER; note = 2'-O-methyladenosine
  modified_base 49: mod_base = OTHER; note = 2'-O-methyluridine
  modified_base 50: mod_base = OTHER; note = 2'-O-methylguanosine
  modified_base 56: mod_base = OTHER; note = Nebularine
  modified_base 62: mod_base = OTHER; note = 2'-O-methyluridine
  modified_base 63: mod_base = OTHER; note = 2'-O-methyladenosine
  modified_base 67: mod_base = OTHER; note = 2'-O-methylcytidine
  modified_base 68: mod_base = OTHER; note = 2'-O-methyluridine
  modified_base 69: mod_base = OTHER; note = 2'-O-methylguanosine
  modified_base 72: mod_base = OTHER; note = 2'-O-methylcytidine
  modified_base 75: mod_base = OTHER; note = 2'-O-methyluridine
  modified_base 76: mod_base = OTHER; note = 2'-O-methylguanosine
  modified_base 79: mod_base = OTHER; note = 2'-O-methyluridine
  modified_base 82: mod_base = OTHER; note = 2'-O-methyluridine
  modified_base 83: mod_base = OTHER; note = 2'-O-methyladenosine
  modified_base 84: mod_base = OTHER; note = 2'-O-methylcytidine
  modified_base 117: mod_base = OTHER; note = 2'-O-methyluridine phosphorothioate
  modified_base 118: mod_base = OTHER; note = 2'-O-methyladenosine phosphorothioate
  modified_base 119: mod_base = OTHER; note = 2'-O-methyladenosine phosphorothioate
  modified_base 120: mod_base = OTHER; note = 2'-O-methyladenosine
gttctgtcttttggtcaggacaaccgtctagctataagtgctgcagggtgtgaganactcctattgctggacgatgtctcttacgaggcattagcacaaccaacagcatagtcaaataaa

SEQ ID NO: 54 - RNA, 120 nt, synthetic construct
  source 1..120: mol_type = other RNA; note = Description of Artificial Sequence: Synthetic polynucleotide
  modified_base 1: mod_base = OTHER; note = 2'-O-methylguanosine phosphorothioate
  modified_base 2: mod_base = OTHER; note = 2'-O-methyluridine phosphorothioate
  modified_base 3: mod_base = OTHER; note = 2'-O-methyluridine phosphorothioate
  modified_base 5: mod_base = OTHER; note = 2'-O-methyluridine
  modified_base 16: mod_base = OTHER; note = 2'-O-methylcytidine
  modified_base 21: mod_base = OTHER; note = 2'-O-methylcytidine
  modified_base 25: mod_base = OTHER; note = 2'-O-methylcytidine
  modified_base 26: mod_base = OTHER; note = 2'-O-methylguanosine
  modified_base 29: mod_base = OTHER; note = 2'-O-methyluridine
  modified_base 30: mod_base = OTHER; note = 2'-O-methyladenosine
  modified_base 44: mod_base = OTHER; note = 2'-O-methylcytidine
  modified_base 45: mod_base = OTHER; note = 2'-O-methyladenosine
  modified_base 49: mod_base = OTHER; note = 2'-O-methyluridine
  modified_base 50: mod_base = OTHER; note = 2'-O-methylguanosine
  modified_base 57: mod_base = OTHER; note = Nebularine
  modified_base 62: mod_base = OTHER; note = 2'-O-methyluridine
  modified_base 63: mod_base = OTHER; note = 2'-O-methyladenosine
  modified_base 67: mod_base = OTHER; note = 2'-O-methylcytidine
  modified_base 68: mod_base = OTHER; note = 2'-O-methyluridine
  modified_base 69: mod_base = OTHER; note = 2'-O-methylguanosine
  modified_base 72: mod_base = OTHER; note = 2'-O-methylcytidine
  modified_base 75: mod_base = OTHER; note = 2'-O-methyluridine
  modified_base 76: mod_base = OTHER; note = 2'-O-methylguanosine
  modified_base 79: mod_base = OTHER; note = 2'-O-methyluridine
  modified_base 82: mod_base = OTHER; note = 2'-O-methyluridine
  modified_base 83: mod_base = OTHER; note = 2'-O-methyladenosine
  modified_base 84: mod_base = OTHER; note = 2'-O-methylcytidine
  modified_base 117: mod_base = OTHER; note = 2'-O-methyluridine phosphorothioate
  modified_base 118: mod_base = OTHER; note = 2'-O-methyladenosine phosphorothioate
  modified_base 119: mod_base = OTHER; note = 2'-O-methyladenosine phosphorothioate
  modified_base 120: mod_base = OTHER; note = 2'-O-methyladenosine
gttctgtcttttggtcaggacaaccgtctagctataagtgctgcagggtgtgagaanctcctattgctggacgatgtctcttacgaggcattagcacaaccaacagcatagtcaaataaa

SEQ ID NO: 55 - RNA, 120 nt, synthetic construct
  source 1..120: mol_type = other RNA; note = Description of Artificial Sequence: Synthetic polynucleotide
  modified_base 1: mod_base = OTHER; note = 2'-O-methylguanosine phosphorothioate
  modified_base 2: mod_base = OTHER; note = 2'-O-methyluridine phosphorothioate
  modified_base 3: mod_base = OTHER; note = 2'-O-methyluridine phosphorothioate
  modified_base 5: mod_base = OTHER; note = 2'-O-methyluridine
  modified_base 16: mod_base = OTHER; note = 2'-O-methylcytidine
  modified_base 21: mod_base = OTHER; note = 2'-O-methylcytidine
  modified_base 25: mod_base = OTHER; note = 2'-O-methylcytidine
  modified_base 26: mod_base = OTHER; note = 2'-O-methylguanosine
  modified_base 29: mod_base = OTHER; note = 2'-O-methyluridine
  modified_base 30: mod_base = OTHER; note = 2'-O-methyladenosine
  modified_base 44: mod_base = OTHER; note = 2'-O-methylcytidine
  modified_base 45: mod_base = OTHER; note = 2'-O-methyladenosine
  modified_base 49: mod_base = OTHER; note = 2'-O-methyluridine
  modified_base 50: mod_base = OTHER; note = 2'-O-methylguanosine
  modified_base 62: mod_base = OTHER; note = 2'-O-methyluridine
  modified_base 63: mod_base = OTHER; note = 2'-O-methyladenosine
  modified_base 67: mod_base = OTHER; note = 2'-O-methylcytidine
  modified_base 68: mod_base = OTHER; note = 2'-O-methyluridine
  modified_base 69: mod_base = OTHER; note = 2'-O-methylguanosine
  modified_base 71: mod_base = OTHER; note = Nebularine
  modified_base 72: mod_base = OTHER; note = 2'-O-methylcytidine
  modified_base 75: mod_base = OTHER; note = 2'-O-methyluridine
  modified_base 76: mod_base = OTHER; note = 2'-O-methylguanosine
  modified_base 79: mod_base = OTHER; note = 2'-O-methyluridine
  modified_base 82: mod_base = OTHER; note = 2'-O-methyluridine
  modified_base 83: mod_base = OTHER; note = 2'-O-methyladenosine
  modified_base 84: mod_base = OTHER; note = 2'-O-methylcytidine
  modified_base 117: mod_base = OTHER; note = 2'-O-methyluridine phosphorothioate
  modified_base 118: mod_base = OTHER; note = 2'-O-methyladenosine phosphorothioate
  modified_base 119: mod_base = OTHER; note = 2'-O-methyladenosine phosphorothioate
  modified_base 120: mod_base = OTHER; note = 2'-O-methyladenosine
gttctgtcttttggtcaggacaaccgtctagctataagtgctgcagggtgtgagaaactcctattgctggncgatgtctcttacgaggcattagcacaaccaacagcatagtcaaataaa

SEQ ID NO: 56 - RNA, 120 nt, synthetic construct
  source 1..120: mol_type = other RNA; note = Description of Artificial Sequence: Synthetic polynucleotide
  modified_base 1: mod_base = OTHER; note = 2'-O-methylguanosine phosphorothioate
  modified_base 2: mod_base = OTHER; note = 2'-O-methyluridine phosphorothioate
  modified_base 3: mod_base = OTHER; note = 2'-O-methyluridine phosphorothioate
  modified_base 5: mod_base = OTHER; note = 2'-O-methyluridine
  modified_base 16: mod_base = OTHER; note = 2'-O-methylcytidine
  modified_base 21: mod_base = OTHER; note = 2'-O-methylcytidine
  modified_base 25: mod_base = OTHER; note = 2'-O-methylcytidine
  modified_base 26: mod_base = OTHER; note = 2'-O-methylguanosine
  modified_base 29: mod_base = OTHER; note = 2'-O-methyluridine
  modified_base 30: mod_base = OTHER; note = 2'-O-methyladenosine
  modified_base 44: mod_base = OTHER; note = 2'-O-methylcytidine
  modified_base 45: mod_base = OTHER; note = 2'-O-methyladenosine
  modified_base 49: mod_base = OTHER; note = 2'-O-methyluridine
  modified_base 50: mod_base = OTHER; note = 2'-O-methylguanosine
  modified_base 62: mod_base = OTHER; note = 2'-O-methyluridine
  modified_base 63: mod_base = OTHER; note = 2'-O-methyladenosine
  modified_base 67: mod_base = OTHER; note = 2'-O-methylcytidine
  modified_base 68: mod_base = OTHER; note = 2'-O-methyluridine
  modified_base 69: mod_base = OTHER; note = 2'-O-methylguanosine
  modified_base 72: mod_base = OTHER; note = 2'-O-methylcytidine
  modified_base 74: mod_base = OTHER; note = Nebularine
  modified_base 75: mod_base = OTHER; note = 2'-O-methyluridine
  modified_base 76: mod_base = OTHER; note = 2'-O-methylguanosine
  modified_base 79: mod_base = OTHER; note = 2'-O-methyluridine
  modified_base 82: mod_base = OTHER; note = 2'-O-methyluridine
  modified_base 83: mod_base = OTHER; note = 2'-O-methyladenosine
  modified_base 84: mod_base = OTHER; note = 2'-O-methylcytidine
  modified_base 117: mod_base = OTHER; note = 2'-O-methyluridine phosphorothioate
  modified_base 118: mod_base = OTHER; note = 2'-O-methyladenosine phosphorothioate
  modified_base 119: mod_base = OTHER; note = 2'-O-methyladenosine phosphorothioate
  modified_base 120: mod_base = OTHER; note = 2'-O-methyladenosine
gttctgtcttttggtcaggacaaccgtctagctataagtgctgcagggtgtgagaaactcctattgctggacgntgtctcttacgaggcattagcacaaccaacagcatagtcaaataaa

SEQ ID NO: 57 - RNA, 120 nt, synthetic construct
  source 1..120: mol_type = other RNA; note = Description of Artificial Sequence: Synthetic polynucleotide
  modified_base 1: mod_base = OTHER; note = 2'-O-methylguanosine phosphorothioate
  modified_base 2: mod_base = OTHER; note = 2'-O-methyluridine phosphorothioate
  modified_base 3: mod_base = OTHER; note = 2'-O-methyluridine phosphorothioate
  modified_base 5: mod_base = OTHER; note = 2'-O-methyluridine
  modified_base 16: mod_base = OTHER; note = 2'-O-methylcytidine
  modified_base 21: mod_base = OTHER; note = 2'-O-methylcytidine
  modified_base 25: mod_base = OTHER; note = 2'-O-methylcytidine
  modified_base 26: mod_base = OTHER; note = 2'-O-methylguanosine
  modified_base 29: mod_base = OTHER; note = 2'-O-methyluridine
  modified_base 30: mod_base = OTHER; note = 2'-O-methylnebularine
  modified_base 44: mod_base = OTHER; note = 2'-O-methylcytidine
  modified_base 45: mod_base = OTHER; note = 2'-O-methyladenosine
  modified_base 49: mod_base = OTHER; note = 2'-O-methyluridine
  modified_base 50: mod_base = OTHER; note = 2'-O-methylguanosine
  modified_base 62: mod_base = OTHER; note = 2'-O-methyluridine
  modified_base 63: mod_base = OTHER; note = 2'-O-methyladenosine
  modified_base 67: mod_base = OTHER; note = 2'-O-methylcytidine
  modified_base 68: mod_base = OTHER; note = 2'-O-methyluridine
  modified_base 69: mod_base = OTHER; note = 2'-O-methylguanosine
  modified_base 72: mod_base = OTHER; note = 2'-O-methylcytidine
  modified_base 75: mod_base = OTHER; note = 2'-O-methyluridine
  modified_base 76: mod_base = OTHER; note = 2'-O-methylguanosine
  modified_base 79: mod_base = OTHER; note = 2'-O-methyluridine
  modified_base 82: mod_base = OTHER; note = 2'-O-methyluridine
  modified_base 83: mod_base = OTHER; note = 2'-O-methyladenosine
  modified_base 84: mod_base = OTHER; note = 2'-O-methylcytidine
  modified_base 117: mod_base = OTHER; note = 2'-O-methyluridine phosphorothioate
  modified_base 118: mod_base = OTHER; note = 2'-O-methyladenosine phosphorothioate
  modified_base 119: mod_base = OTHER; note = 2'-O-methyladenosine phosphorothioate
  modified_base 120: mod_base = OTHER; note = 2'-O-methyladenosine
gttctgtcttttggtcaggacaaccgtctngctataagtgctgcagggtgtgagaaactcctattgctggacgatgtctcttacgaggcattagcacaaccaacagcatagtcaaataaa

SEQ ID NO: 58 - RNA, 120 nt, synthetic construct
  source 1..120: mol_type = other RNA; note = Description of Artificial Sequence: Synthetic polynucleotide
  modified_base 1: mod_base = OTHER; note = 2'-O-methylguanosine phosphorothioate
  modified_base 2: mod_base = OTHER; note = 2'-O-methyluridine phosphorothioate
  modified_base 3: mod_base = OTHER; note = 2'-O-methyluridine phosphorothioate
  modified_base 5: mod_base = OTHER; note = 2'-O-methyluridine
  modified_base 16: mod_base = OTHER; note = 2'-O-methylcytidine
  modified_base 21: mod_base = OTHER; note = 2'-O-methylcytidine
  modified_base 25: mod_base = OTHER; note = 2'-O-methylcytidine
  modified_base 26: mod_base = OTHER; note = 2'-O-methylguanosine
  modified_base 29: mod_base = OTHER; note = 2'-O-methyluridine
  modified_base 30: mod_base = OTHER; note = 2'-O-methyladenosine
  modified_base 44: mod_base = OTHER; note = 2'-O-methylcytidine
  modified_base 45: mod_base = OTHER; note = 2'-O-methylnebularine
  modified_base 49: mod_base = OTHER; note = 2'-O-methyluridine
  modified_base 50: mod_base = OTHER; note = 2'-O-methylguanosine
  modified_base 62: mod_base = OTHER; note = 2'-O-methyluridine
  modified_base 63: mod_base = OTHER; note = 2'-O-methyladenosine
  modified_base 67: mod_base = OTHER; note = 2'-O-methylcytidine
  modified_base 68: mod_base = OTHER; note = 2'-O-methyluridine
  modified_base 69: mod_base = OTHER; note = 2'-O-methylguanosine
  modified_base 72: mod_base = OTHER; note = 2'-O-methylcytidine
  modified_base 75: mod_base = OTHER; note = 2'-O-methyluridine
  modified_base 76: mod_base = OTHER; note = 2'-O-methylguanosine
  modified_base 79: mod_base = OTHER; note = 2'-O-methyluridine
  modified_base 82: mod_base = OTHER; note = 2'-O-methyluridine
  modified_base 83: mod_base = OTHER; note = 2'-O-methyladenosine
  modified_base 84: mod_base = OTHER; note = 2'-O-methylcytidine
  modified_base 117: mod_base = OTHER; note = 2'-O-methyluridine phosphorothioate
  modified_base 118: mod_base = OTHER; note = 2'-O-methyladenosine phosphorothioate
  modified_base 119: mod_base = OTHER; note = 2'-O-methyladenosine phosphorothioate
  modified_base 120: mod_base = OTHER; note = 2'-O-methyladenosine
gttctgtcttttggtcaggacaaccgtctagctataagtgctgcngggtgtgagaaactcctattgctggacgatgtctcttacgaggcattagcacaaccaacagcatagtcaaataaa

SEQ ID NO: 59 - RNA, 120 nt, synthetic construct
  source 1..120: mol_type = other RNA; note = Description of Artificial Sequence: Synthetic polynucleotide
  modified_base 1: mod_base = OTHER; note = 2'-O-methylguanosine phosphorothioate
  modified_base 2: mod_base = OTHER; note = 2'-O-methyluridine phosphorothioate
  modified_base 3: mod_base = OTHER; note = 2'-O-methyluridine phosphorothioate
  modified_base 5: mod_base = OTHER; note = 2'-O-methyluridine
  modified_base 16: mod_base = OTHER; note = 2'-O-methylcytidine
  modified_base 21: mod_base = OTHER; note = 2'-O-methylcytidine
  modified_base 25: mod_base = OTHER; note = 2'-O-methylcytidine
  modified_base 26: mod_base = OTHER; note = 2'-O-methylguanosine
  modified_base 29: mod_base = OTHER; note = 2'-O-methyluridine
  modified_base 30: mod_base = OTHER; note = 2'-O-methyladenosine
  modified_base 44: mod_base = OTHER; note = 2'-O-methylcytidine
  modified_base 45: mod_base = OTHER; note = 2'-O-methyladenosine
  modified_base 49: mod_base = OTHER; note = 2'-O-methyluridine
  modified_base 50: mod_base = OTHER; note = 2'-O-methylguanosine
  modified_base 62: mod_base = OTHER; note = 2'-O-methyluridine
  modified_base 63: mod_base = OTHER; note = 2'-O-methylnebularine
  modified_base 67: mod_base = OTHER; note = 2'-O-methylcytidine
  modified_base 68: mod_base = OTHER; note = 2'-O-methyluridine
  modified_base 69: mod_base = OTHER; note = 2'-O-methylguanosine
  modified_base 72: mod_base = OTHER; note = 2'-O-methylcytidine
  modified_base 75: mod_base = OTHER; note = 2'-O-methyluridine
  modified_base 76: mod_base = OTHER; note = 2'-O-methylguanosine
  modified_base 79: mod_base = OTHER; note = 2'-O-methyluridine
  modified_base 82: mod_base = OTHER; note = 2'-O-methyluridine
  modified_base 83: mod_base = OTHER; note = 2'-O-methyladenosine
  modified_base 84: mod_base = OTHER; note = 2'-O-methylcytidine
  modified_base 117: mod_base = OTHER; note = 2'-O-methyluridine phosphorothioate
  modified_base 118: mod_base = OTHER; note = 2'-O-methyladenosine phosphorothioate
  modified_base 119: mod_base = OTHER; note = 2'-O-methyladenosine phosphorothioate
  modified_base 120: mod_base = OTHER; note = 2'-O-methyladenosine
gttctgtcttttggtcaggacaaccgtctagctataagtgctgcagggtgtgagaaactcctnttgctggacgatgtctcttacgaggcattagcacaaccaacagcatagtcaaataaa

SEQ ID NO: 60 - RNA, 120 nt, synthetic construct
  source 1..120: mol_type = other RNA; note = Description of Artificial Sequence: Synthetic polynucleotide
  modified_base 1: mod_base = OTHER; note = 2'-O-methylguanosine phosphorothioate
  modified_base 2: mod_base = OTHER; note = 2'-O-methyluridine phosphorothioate
  modified_base 3: mod_base = OTHER; note = 2'-O-methyluridine phosphorothioate
  modified_base 5: mod_base = OTHER; note = 2'-O-methyluridine
  modified_base 16: mod_base = OTHER; note = 2'-O-methylcytidine
  modified_base 21: mod_base = OTHER; note = 2'-O-methylcytidine
  modified_base 22: mod_base = OTHER; note = Nebularine
  modified_base 25: mod_base = OTHER; note = 2'-O-methylcytidine
  modified_base 26: mod_base = OTHER; note = 2'-O-methylguanosine
  modified_base 29: mod_base = OTHER; note = 2'-O-methyluridine
  modified_base 30: mod_base = OTHER; note = 2'-O-methyladenosine
  modified_base 44: mod_base = OTHER; note = 2'-O-methylcytidine
  modified_base 45: mod_base = OTHER; note = 2'-O-methyladenosine
  modified_base 49: mod_base = OTHER; note = 2'-O-methyluridine
  modified_base 50: mod_base = OTHER; note = 2'-O-methylguanosine
  modified_base 56: mod_base = OTHER; note = Nebularine
  modified_base 62: mod_base = OTHER; note = 2'-O-methyluridine
  modified_base 63: mod_base = OTHER; note = 2'-O-methyladenosine
  modified_base 67: mod_base = OTHER; note = 2'-O-methylcytidine
  modified_base 68: mod_base = OTHER; note = 2'-O-methyluridine
  modified_base 69: mod_base = OTHER; note = 2'-O-methylguanosine
  modified_base 72: mod_base = OTHER; note = 2'-O-methylcytidine
  modified_base 75: mod_base = OTHER; note = 2'-O-methyluridine
  modified_base 76: mod_base = OTHER; note = 2'-O-methylguanosine
  modified_base 79: mod_base = OTHER; note = 2'-O-methyluridine
  modified_base 82: mod_base = OTHER; note = 2'-O-methyluridine
  modified_base 83: mod_base = OTHER; note = 2'-O-methyladenosine
  modified_base 84: mod_base = OTHER; note = 2'-O-methylcytidine
  modified_base 117: mod_base = OTHER; note = 2'-O-methyluridine phosphorothioate
  modified_base 118: mod_base = OTHER; note = 2'-O-methyladenosine phosphorothioate
  modified_base 119: mod_base = OTHER; note = 2'-O-methyladenosine phosphorothioate
  modified_base 120: mod_base = OTHER; note = 2'-O-methyladenosine
gttctgtcttttggtcaggacnaccgtctagctataagtgctgcagggtgtgaganactcctattgctggacgatgtctcttacgaggcattagcacaaccaacagcatagtcaaataaa

SEQ ID NO: 61 - RNA, 120 nt, synthetic construct
  source 1..120: mol_type = other RNA; note = Description of Artificial Sequence: Synthetic polynucleotide
  modified_base 1: mod_base = OTHER; note = 2'-O-methylguanosine phosphorothioate
  modified_base 2: mod_base = OTHER; note = 2'-O-methyluridine phosphorothioate
  modified_base 3: mod_base = OTHER; note = 2'-O-methyluridine phosphorothioate
  modified_base 5: mod_base = OTHER; note = 2'-O-methyluridine
  modified_base 16: mod_base = OTHER; note = 2'-O-methylcytidine
  modified_base 21: mod_base = OTHER; note = 2'-O-methylcytidine
  modified_base 23: mod_base = OTHER; note = Nebularine
  modified_base 25: mod_base = OTHER; note = 2'-O-methylcytidine
  modified_base 26: mod_base = OTHER; note = 2'-O-methylguanosine
  modified_base 29: mod_base = OTHER; note = 2'-O-methyluridine
  modified_base 30: mod_base = OTHER; note = 2'-O-methylnebularine
  modified_base 44: mod_base = OTHER; note = 2'-O-methylcytidine
  modified_base 45: mod_base = OTHER; note = 2'-O-methylnebularine
  modified_base 49: mod_base = OTHER; note = 2'-O-methyluridine
  modified_base 50: mod_base = OTHER; note = 2'-O-methylguanosine
  modified_base 62: mod_base = OTHER; note = 2'-O-methyluridine
  modified_base 63: mod_base = OTHER; note = 2'-O-methyladenosine
  modified_base 67: mod_base = OTHER; note = 2'-O-methylcytidine
  modified_base 68: mod_base = OTHER; note = 2'-O-methyluridine
  modified_base 69: mod_base = OTHER; note = 2'-O-methylguanosine
  modified_base 72: mod_base = OTHER; note = 2'-O-methylcytidine
  modified_base 75: mod_base = OTHER; note = 2'-O-methyluridine
  modified_base 76: mod_base = OTHER; note = 2'-O-methylguanosine
  modified_base 79: mod_base = OTHER; note = 2'-O-methyluridine
  modified_base 82: mod_base = OTHER; note = 2'-O-methyluridine
  modified_base 83: mod_base = OTHER; note = 2'-O-methyladenosine
  modified_base 84: mod_base = OTHER; note = 2'-O-methylcytidine
  modified_base 117: mod_base = OTHER; note = 2'-O-methyluridine phosphorothioate
  modified_base 118: mod_base = OTHER; note = 2'-O-methyladenosine phosphorothioate
  modified_base 119: mod_base = OTHER; note = 2'-O-methyladenosine phosphorothioate
  modified_base 120: mod_base = OTHER; note = 2'-O-methyladenosine
gttctgtcttttggtcaggacanccgtctngctataagtgctgcngggtgtgagaaactcctattgctggacgatgtctcttacgaggcattagcacaaccaacagcatagtcaaataaa

SEQ ID NO: 62 - RNA, 120 nt, synthetic construct
  source 1..120: mol_type = other RNA; note = Description of Artificial Sequence: Synthetic polynucleotide
  modified_base 1: mod_base = OTHER; note = 2'-O-methylguanosine phosphorothioate
  modified_base 2: mod_base = OTHER; note = 2'-O-methyluridine phosphorothioate
  modified_base 3: mod_base = OTHER; note = 2'-O-methyluridine phosphorothioate
  modified_base 5: mod_base = OTHER; note = 2'-O-methyluridine
  modified_base 16: mod_base = OTHER; note = 2'-O-methylcytidine
  modified_base 21: mod_base = OTHER; note = 2'-O-methylcytidine
  modified_base 25: mod_base = OTHER; note = 2'-O-methylcytidine
  modified_base 26: mod_base = OTHER; note = 2'-O-methylguanosine
  modified_base 29: mod_base = OTHER; note = 2'-O-methyluridine
  modified_base 30: mod_base = OTHER; note = 2'-O-methyladenosine
  modified_base 34: mod_base = OTHER; note = Nebularine
  modified_base 44: mod_base = OTHER; note = 2'-O-methylcytidine
  modified_base 45: mod_base = OTHER; note = 2'-O-methyladenosine
  modified_base 49: mod_base = OTHER; note = 2'-O-methyluridine
  modified_base 50: mod_base = OTHER; note = 2'-O-methylguanosine
  modified_base 62: mod_base = OTHER; note = 2'-O-methyluridine
  modified_base 63: mod_base = OTHER; note = 2'-O-methylnebularine
  modified_base 67: mod_base = OTHER; note = 2'-O-methylcytidine
  modified_base 68: mod_base = OTHER; note = 2'-O-methyluridine
  modified_base 69: mod_base = OTHER; note = 2'-O-methylguanosine
  modified_base 72: mod_base = OTHER; note = 2'-O-methylcytidine
  modified_base 75: mod_base = OTHER; note = 2'-O-methyluridine
  modified_base 76: mod_base = OTHER; note = 2'-O-methylguanosine
  modified_base 79: mod_base = OTHER; note = 2'-O-methyluridine
  modified_base 82: mod_base = OTHER; note = 2'-O-methyluridine
  modified_base 83: mod_base = OTHER; note = 2'-O-methyladenosine
  modified_base 84: mod_base = OTHER; note = 2'-O-methylcytidine
  modified_base 117: mod_base = OTHER; note = 2'-O-methyluridine phosphorothioate
  modified_base 118: mod_base = OTHER; note = 2'-O-methyladenosine phosphorothioate
  modified_base 119: mod_base = OTHER; note = 2'-O-methyladenosine phosphorothioate
  modified_base 120: mod_base = OTHER; note = 2'-O-methyladenosine
gttctgtcttttggtcaggacaaccgtctagctntaagtgctgcagggtgtgagaaactcctnttgctggacgatgtctcttacgaggcattagcacaaccaacagcatagtcaaataaa

SEQ ID NO: 63 - RNA, 120 nt, synthetic construct
  source 1..120: mol_type = other RNA; note = Description of Artificial Sequence: Synthetic polynucleotide
  modified_base 1: mod_base = OTHER; note = 2'-O-methylguanosine phosphorothioate
  modified_base 2: mod_base = OTHER; note = 2'-O-methyluridine phosphorothioate
  modified_base 3: mod_base = OTHER; note = 2'-O-methyluridine phosphorothioate
  modified_base 5: mod_base = OTHER; note = 2'-O-methyluridine
  modified_base 16: mod_base = OTHER; note = 2'-O-methylcytidine
  modified_base 21: mod_base = OTHER; note = 2'-O-methylcytidine
  modified_base 25: mod_base = OTHER; note = 2'-O-methylcytidine
  modified_base 26: mod_base = OTHER; note = 2'-O-methylguanosine
  modified_base 29: mod_base = OTHER; note = 2'-O-methyluridine
  modified_base 30: mod_base = OTHER; note = 2'-O-methyladenosine
  modified_base 37: mod_base = OTHER; note = Nebularine
  modified_base 44: mod_base = OTHER; note = 2'-O-methylcytidine
  modified_base 45: mod_base = OTHER; note = 2'-O-methyladenosine
  modified_base 49: mod_base = OTHER; note = 2'-O-methyluridine
  modified_base 50: mod_base = OTHER; note = 2'-O-methylguanosine
  modified_base 62: mod_base = OTHER; note = 2'-O-methyluridine
  modified_base 63: mod_base = OTHER; note = 2'-O-methyladenosine
  modified_base 67: mod_base = OTHER; note = 2'-O-methylcytidine
  modified_base 68: mod_base = OTHER; note = 2'-O-methyluridine
  modified_base 69: mod_base = OTHER; note = 2'-O-methylguanosine
  modified_base 71: mod_base = OTHER; note = Nebularine
  modified_base 72: mod_base = OTHER; note = 2'-O-methylcytidine
  modified_base 75: mod_base = OTHER; note = 2'-O-methyluridine
  modified_base 76: mod_base = OTHER; note = 2'-O-methylguanosine
  modified_base 79: mod_base = OTHER; note = 2'-O-methyluridine
  modified_base 82: mod_base = OTHER; note = 2'-O-methyluridine
  modified_base 83: mod_base = OTHER; note = 2'-O-methyladenosine
  modified_base 84: mod_base = OTHER; note = 2'-O-methylcytidine
  modified_base 117: mod_base = OTHER; note = 2'-O-methyluridine phosphorothioate
  modified_base 118: mod_base = OTHER; note = 2'-O-methyladenosine phosphorothioate
  modified_base 119: mod_base = OTHER; note = 2'-O-methyladenosine phosphorothioate
  modified_base 120: mod_base = OTHER; note = 2'-O-methyladenosine
gttctgtcttttggtcaggacaaccgtctagctatangtgctgcagggtgtgagaaactcctattgctggncgatgtctcttacgaggcattagcacaaccaacagcatagtcaaataaa

SEQ ID NO: 64 - RNA, 120 nt, synthetic construct
  source 1..120: mol_type = other RNA; note = Description of Artificial Sequence: Synthetic polynucleotide
  modified_base 1: mod_base = OTHER; note = 2'-O-methylguanosine phosphorothioate
  modified_base 2: mod_base = OTHER; note = 2'-O-methyluridine phosphorothioate
  modified_base 3: mod_base = OTHER; note = 2'-O-methyluridine phosphorothioate
  modified_base 5: mod_base = OTHER; note = 2'-O-methyluridine
  modified_base 16: mod_base = OTHER; note = 2'-O-methylcytidine
  modified_base 21: mod_base = OTHER; note = 2'-O-methylcytidine
  modified_base 25: mod_base = OTHER; note = 2'-O-methylcytidine
  modified_base 26: mod_base = OTHER; note = 2'-O-methylguanosine
  modified_base 29: mod_base = OTHER; note = 2'-O-methyluridine
  modified_base 30: mod_base = OTHER; note = 2'-O-methylnebularine
  modified_base 44: mod_base = OTHER; note = 2'-O-methylcytidine
  modified_base 45: mod_base = OTHER; note = 2'-O-methyladenosine
  modified_base 49: mod_base = OTHER; note = 2'-O-methyluridine
  modified_base 50: mod_base = OTHER; note = 2'-O-methylguanosine
  modified_base 55: mod_base = OTHER; note = Nebularine
  modified_base 62: mod_base = OTHER; note = 2'-O-methyluridine
  modified_base 63: mod_base = OTHER; note = 2'-O-methyladenosine
  modified_base 67: mod_base = OTHER; note = 2'-O-methylcytidine
  modified_base 68: mod_base = OTHER; note = 2'-O-methyluridine
  modified_base 69: mod_base = OTHER; note = 2'-O-methylguanosine
  modified_base 72: mod_base = OTHER; note = 2'-O-methylcytidine
  modified_base 75: mod_base = OTHER; note = 2'-O-methyluridine
  modified_base 76: mod_base = OTHER; note = 2'-O-methylguanosine
  modified_base 79: mod_base = OTHER; note = 2'-O-methyluridine
  modified_base 82: mod_base = OTHER; note = 2'-O-methyluridine
  modified_base 83: mod_base = OTHER; note = 2'-O-methyladenosine
  modified_base 84: mod_base = OTHER; note = 2'-O-methylcytidine
  modified_base 117: mod_base = OTHER; note = 2'-O-methyluridine phosphorothioate
  modified_base 118: mod_base = OTHER; note = 2'-O-methyladenosine phosphorothioate
  modified_base 119: mod_base = OTHER; note = 2'-O-methyladenosine phosphorothioate
  modified_base 120: mod_base = OTHER; note = 2'-O-methyladenosine
gttctgtcttttggtcaggacaaccgtctngctataagtgctgcagggtgtgagnaactcctattgctggacgatgtctcttacgaggcattagcacaaccaacagcatagtcaaataaa

SEQ ID NO: 65 - RNA, 120 nt, synthetic construct
  source 1..120: mol_type = other RNA; note = Description of Artificial Sequence: Synthetic polynucleotide
  modified_base 1: mod_base = OTHER; note = 2'-O-methylguanosine phosphorothioate
  modified_base 2: mod_base = OTHER; note = 2'-O-methyluridine phosphorothioate
  modified_base 3: mod_base = OTHER; note = 2'-O-methyluridine phosphorothioate
  modified_base 5: mod_base = OTHER; note = 2'-O-methyluridine
  modified_base 16: mod_base = OTHER; note = 2'-O-methylcytidine
  modified_base 21: mod_base = OTHER; note = 2'-O-methylcytidine
  modified_base 25: mod_base = OTHER; note = 2'-O-methylcytidine
  modified_base 26: mod_base = OTHER; note = 2'-O-methylguanosine
  modified_base 29: mod_base = OTHER; note = 2'-O-methyluridine
  modified_base 30: mod_base = OTHER; note = 2'-O-methylnebularine
  modified_base 44: mod_base = OTHER; note = 2'-O-methylcytidine
  modified_base 45: mod_base = OTHER; note = 2'-O-methylnebularine
  modified_base 49: mod_base = OTHER; note = 2'-O-methyluridine
  modified_base 50: mod_base = OTHER; note = 2'-O-methylguanosine
  modified_base 56: mod_base = OTHER; note = Nebularine
  modified_base 62: mod_base = OTHER; note = 2'-O-methyluridine
  modified_base 63: mod_base = OTHER; note = 2'-O-methyladenosine
  modified_base 67: mod_base = OTHER; note = 2'-O-methylcytidine
  modified_base 68: mod_base = OTHER; note = 2'-O-methyluridine
  modified_base 69: mod_base = OTHER; note = 2'-O-methylguanosine
  modified_base 72: mod_base = OTHER; note = 2'-O-methylcytidine
  modified_base 75: mod_base = OTHER; note = 2'-O-methyluridine
  modified_base 76: mod_base = OTHER; note = 2'-O-methylguanosine
  modified_base 79: mod_base = OTHER; note = 2'-O-methyluridine
  modified_base 82: mod_base = OTHER; note = 2'-O-methyluridine
  modified_base 83: mod_base = OTHER; note = 2'-O-methyladenosine
  modified_base 84: mod_base = OTHER; note = 2'-O-methylcytidine
  modified_base 117: mod_base = OTHER; note = 2'-O-methyluridine phosphorothioate
  modified_base 118: mod_base = OTHER; note = 2'-O-methyladenosine phosphorothioate
  modified_base 119: mod_base = OTHER; note = 2'-O-methyladenosine phosphorothioate
  modified_base 120: mod_base = OTHER; note = 2'-O-methyladenosine
gttctgtcttttggtcaggacaaccgtctngctataagtgctgcngggtgtgaganactcctattgctggacgatgtctcttacgaggcattagcacaaccaacagcatagtcaaataaa

SEQ ID NO: 66 - RNA, 120 nt, synthetic construct
  source 1..120: mol_type = other RNA; note = Description of Artificial Sequence: Synthetic polynucleotide
  modified_base 1: mod_base = OTHER; note = 2'-O-methylguanosine phosphorothioate
  modified_base 2: mod_base = OTHER; note = 2'-O-methyluridine phosphorothioate
  modified_base 3: mod_base = OTHER; note = 2'-O-methyluridine phosphorothioate
  modified_base 5: mod_base = OTHER; note = 2'-O-methyluridine
  modified_base 16: mod_base = OTHER; note = 2'-O-methylcytidine
  modified_base 21: mod_base = OTHER; note = 2'-O-methylcytidine
  modified_base 23: mod_base = OTHER; note = Nebularine
  modified_base 25: mod_base = OTHER; note = 2'-O-methylcytidine
  modified_base 26: mod_base = OTHER; note = 2'-O-methylguanosine
  modified_base 29: mod_base = OTHER; note = 2'-O-methyluridine
  modified_base 30: mod_base = OTHER; note = 2'-O-methyladenosine
  modified_base 44: mod_base = OTHER; note = 2'-O-methylcytidine
  modified_base 45: mod_base = OTHER; note = 2'-O-methyladenosine
  modified_base 49: mod_base = OTHER; note = 2'-O-methyluridine
  modified_base 50: mod_base = OTHER; note = 2'-O-methylguanosine
  modified_base 57: mod_base = OTHER; note = Nebularine
  modified_base 62: mod_base = OTHER; note = 2'-O-methyluridine
  modified_base 63: mod_base = OTHER; note = 2'-O-methyladenosine
  modified_base 67: mod_base = OTHER; note = 2'-O-methylcytidine
  modified_base 68: mod_base = OTHER; note = 2'-O-methyluridine
  modified_base 69: mod_base = OTHER; note = 2'-O-methylguanosine
  modified_base 72: mod_base = OTHER; note = 2'-O-methylcytidine
  modified_base 75: mod_base = OTHER; note = 2'-O-methyluridine
  modified_base 76: mod_base = OTHER; note = 2'-O-methylguanosine
  modified_base 79: mod_base = OTHER; note = 2'-O-methyluridine
  modified_base 82: mod_base = OTHER; note = 2'-O-methyluridine
  modified_base 83: mod_base = OTHER; note = 2'-O-methyladenosine
  modified_base 84: mod_base = OTHER; note = 2'-O-methylcytidine
  modified_base 117: mod_base = OTHER; note = 2'-O-methyluridine phosphorothioate
  modified_base 118: mod_base = OTHER; note = 2'-O-methyladenosine phosphorothioate
  modified_base 119: mod_base = OTHER; note = 2'-O-methyladenosine phosphorothioate
  modified_base 120: mod_base = OTHER; note = 2'-O-methyladenosine
gttctgtcttttggtcaggacanccgtctagctataagtgctgcagggtgtgagaanctcctattgctggacgatgtctcttacgaggcattagcacaaccaacagcatagtcaaataaa

SEQ ID NO: 67 - RNA, 120 nt, synthetic construct
  source 1..120: mol_type = other RNA; note = Description of Artificial Sequence: Synthetic polynucleotide
  modified_base 1: mod_base = OTHER; note = 2'-O-methylguanosine phosphorothioate
  modified_base 2: mod_base = OTHER; note = 2'-O-methyluridine phosphorothioate
  modified_base 3: mod_base = OTHER; note = 2'-O-methyluridine phosphorothioate
  modified_base 5: mod_base = OTHER; note = 2'-O-methyluridine
  modified_base 16: mod_base = OTHER; note = 2'-O-methylcytidine
  modified_base 21: mod_base = OTHER; note = 2'-O-methylcytidine
  modified_base 25: mod_base = OTHER; note = 2'-O-methylcytidine
  modified_base 26: mod_base = OTHER; note = 2'-O-methylguanosine
  modified_base 29: mod_base = OTHER; note = 2'-O-methyluridine
  modified_base 30: mod_base = OTHER; note = 2'-O-methyladenosine
  modified_base 44: mod_base = OTHER; note = 2'-O-methylcytidine
  modified_base 45: mod_base = OTHER; note = 2'-O-methyladenosine
  modified_base 49: mod_base = OTHER; note = 2'-O-methyluridine
  modified_base 50: mod_base = OTHER; note = 2'-O-methylguanosine
  modified_base 62: mod_base = OTHER; note = 2'-O-methyluridine
  modified_base 63: mod_base = OTHER; note = 2'-O-methyladenosine
  modified_base 67: mod_base = OTHER; note = 2'-O-methylcytidine
  modified_base 68: mod_base = OTHER; note = 2'-O-methyluridine
  modified_base 69: mod_base = OTHER; note = 2'-O-methylguanosine
  modified_base 71: mod_base = OTHER; note = Nebularine
  modified_base 72: mod_base = OTHER; note = 2'-O-methylcytidine
  modified_base 75: mod_base = OTHER; note = 2'-O-methyluridine
  modified_base 76: mod_base = OTHER; note = 2'-O-methylguanosine
  modified_base 79: mod_base = OTHER; note = 2'-O-methyluridine
  modified_base 82: mod_base = OTHER; note = 2'-O-methyluridine
  modified_base 83: mod_base = OTHER; note = 2'-O-methylnebularine
  modified_base 84: mod_base = OTHER; note = 2'-O-methylcytidine
  modified_base 117: mod_base = OTHER; note = 2'-O-methyluridine phosphorothioate
  modified_base 118: mod_base = OTHER; note = 2'-O-methyladenosine phosphorothioate
  modified_base 119: mod_base = OTHER; note = 2'-O-methyladenosine phosphorothioate
  modified_base 120: mod_base = OTHER; note = 2'-O-methyladenosine
gttctgtcttttggtcaggacaaccgtctagctataagtgctgcagggtgtgagaaactcctattgctggncgatgtctcttncgaggcattagcacaaccaacagcatagtcaaataaa

SEQ ID NO: 68 - RNA, 120 nt, synthetic construct
  source 1..120: mol_type = other RNA; note = Description of Artificial Sequence: Synthetic polynucleotide
  modified_base 1: mod_base = OTHER; note = 2'-O-methylguanosine phosphorothioate
  modified_base 2: mod_base = OTHER; note = 2'-O-methyluridine phosphorothioate
  modified_base 3: mod_base = OTHER; note = 2'-O-methyluridine phosphorothioate
  modified_base 5: mod_base = OTHER; note = 2'-O-methyluridine
  modified_base 16: mod_base = OTHER; note = 2'-O-methylcytidine
  modified_base 21: mod_base = OTHER; note = 2'-O-methylcytidine
  modified_base 25: mod_base = OTHER; note = 2'-O-methylcytidine
  modified_base 26: mod_base = OTHER; note = 2'-O-methylguanosine
  modified_base 29: mod_base = OTHER; note = 2'-O-methyluridine
  modified_base 30: mod_base = OTHER; note = 2'-O-methylnebularine
  modified_base 44: mod_base = OTHER; note = 2'-O-methylcytidine
  modified_base 45: mod_base = OTHER; note = 2'-O-methylnebularine
  modified_base 49: mod_base = OTHER; note = 2'-O-methyluridine
  modified_base 50: mod_base = OTHER; note = 2'-O-methylguanosine
  modified_base 62: mod_base = OTHER; note = 2'-O-methyluridine
  modified_base 63: mod_base = OTHER; note = 2'-O-methylnebularine
  modified_base 67: mod_base = OTHER; note = 2'-O-methylcytidine
  modified_base 68: mod_base = OTHER; note = 2'-O-methyluridine
  modified_base 69: mod_base = OTHER; note = 2'-O-methylguanosine
  modified_base 72: mod_base = OTHER; note = 2'-O-methylcytidine
  modified_base 75: mod_base = OTHER; note = 2'-O-methyluridine
  modified_base 76: mod_base = OTHER; note = 2'-O-methylguanosine
  modified_base 79: mod_base = OTHER; note = 2'-O-methyluridine
  modified_base 82: mod_base = OTHER; note = 2'-O-methyluridine
  modified_base 83: mod_base = OTHER; note = 2'-O-methylnebularine
  modified_base 84: mod_base = OTHER; note = 2'-O-methylcytidine
  modified_base 117: mod_base = OTHER; note = 2'-O-methyluridine phosphorothioate
  modified_base 118: mod_base = OTHER; note = 2'-O-methyladenosine phosphorothioate
  modified_base 119: mod_base = OTHER; note = 2'-O-methyladenosine phosphorothioate
  modified_base 120: mod_base = OTHER; note = 2'-O-methyladenosine
gttctgtcttttggtcaggacaaccgtctngctataagtgctgcngggtgtgagaaactcctnttgctggacgatgtctcttncgaggcattagcacaaccaacagcatagtcaaataaa

SEQ ID NO: 69 - RNA, 120 nt, synthetic construct
  source 1..120: mol_type = other RNA; note = Description of Artificial Sequence: Synthetic polynucleotide
  modified_base 1: mod_base = OTHER; note = 2'-O-methylguanosine phosphorothioate
  modified_base 2: mod_base = OTHER; note = 2'-O-methyluridine phosphorothioate
  modified_base 3: mod_base = OTHER; note = 2'-O-methyluridine phosphorothioate
  modified_base 5: mod_base = OTHER; note = 2'-O-methyluridine
  modified_base 16: mod_base = OTHER; note = 2'-O-methylcytidine
  modified_base 21: mod_base = OTHER; note = 2'-O-methylcytidine
  modified_base 25: mod_base = OTHER; note = 2'-O-methylcytidine
  modified_base 26: mod_base = OTHER; note = 2'-O-methylguanosine
  modified_base 29: mod_base = OTHER; note = 2'-O-methyluridine
  modified_base 30: mod_base = OTHER; note = 2'-O-methyladenosine
  modified_base 44: mod_base = OTHER; note = 2'-O-methylcytidine
  modified_base 45: mod_base = OTHER; note = 2'-O-methyladenosine
  modified_base 49: mod_base = OTHER; note = 2'-O-methyluridine
  modified_base 50: mod_base = OTHER; note = 2'-O-methylguanosine
  modified_base 62: mod_base = OTHER; note = 2'-O-methyluridine
  modified_base 63: mod_base = OTHER; note = 2'-O-methyladenosine
  modified_base 67: mod_base = OTHER; note = 2'-O-methylcytidine
  modified_base 68: mod_base = OTHER; note = 2'-O-methyluridine
  modified_base 69: mod_base = OTHER; note = 2'-O-methylguanosine
  modified_base 72: mod_base = OTHER; note = 2'-O-methylcytidine
  modified_base 75: mod_base = OTHER; note = 2'-O-methyluridine
  modified_base 76: mod_base = OTHER; note = 2'-O-methylguanosine
  modified_base 79: mod_base = OTHER; note = 2'-O-methyluridine
  modified_base 82: mod_base = OTHER; note = 2'-O-methyluridine
  modified_base 83: mod_base = OTHER; note = 2'-O-methylnebularine
  modified_base 84: mod_base = OTHER; note = 2'-O-methylcytidine
  modified_base 117: mod_base = OTHER; note = 2'-O-methyluridine phosphorothioate
  modified_base 118: mod_base = OTHER; note = 2'-O-methyladenosine phosphorothioate
  modified_base 119: mod_base = OTHER; note = 2'-O-methyladenosine phosphorothioate
  modified_base 120: mod_base = OTHER; note = 2'-O-methyladenosine
gttctgtcttttggtcaggacaaccgtctagctataagtgctgcagggtgtgagaaactcctattgctggacgatgtctcttncgaggcattagcacaaccaacagcatagtcaaataaa

SEQ ID NO: 70 - RNA, 120 nt, synthetic construct
  source 1..120: mol_type = other RNA; note = Description of Artificial Sequence: Synthetic polynucleotide
  modified_base 1: mod_base = OTHER; note = 2'-O-methylguanosine phosphorothioate
  modified_base 2: mod_base = OTHER; note = 2'-O-methyluridine phosphorothioate
  modified_base 3: mod_base = OTHER; note = 2'-O-methyluridine phosphorothioate
  modified_base 5: mod_base = OTHER; note = 2'-O-methyluridine
  modified_base 16: mod_base = OTHER; note = 2'-O-methylcytidine
  modified_base 21: mod_base = OTHER; note = 2'-O-methylcytidine
  modified_base 25: mod_base = OTHER; note = 2'-O-methylcytidine
  modified_base 26: mod_base = OTHER; note = 2'-O-methylguanosine
  modified_base 29: mod_base = OTHER; note = 2'-O-methyluridine
  modified_base 30: mod_base = OTHER; note = 2'-O-methyladenosine
  modified_base 44: mod_base = OTHER; note = 2'-O-methylcytidine
  modified_base 45: mod_base = OTHER; note = 2'-O-methyladenosine
  modified_base 49: mod_base = OTHER; note = 2'-O-methyluridine
  modified_base 50: mod_base = OTHER; note = 2'-O-methylguanosine
  modified_base 62: mod_base = OTHER; note = 2'-O-methyluridine
  modified_base 63: mod_base = OTHER; note = 2'-O-methyladenosine
  modified_base 67: mod_base = OTHER; note = 2'-O-methylcytidine
  modified_base 68: mod_base = OTHER; note = 2'-O-methyluridine
  modified_base 69: mod_base = OTHER; note = 2'-O-methylguanosine
  modified_base 72: mod_base = OTHER; note = 2'-O-methylcytidine
  modified_base 75: mod_base = OTHER; note = 2'-O-methyluridine
  modified_base 76: mod_base = OTHER; note = 2'-O-methylguanosine
  modified_base 79: mod_base = OTHER; note = 2'-O-methyluridine
  modified_base 82: mod_base = OTHER; note = 2'-O-methyluridine
  modified_base 83: mod_base = OTHER; note = 2'-O-methyladenosine
  modified_base 84: mod_base = OTHER; note = 2'-O-methylcytidine
  modified_base 86: mod_base = OTHER; note = Nebularine
  modified_base 117: mod_base = OTHER; note = 2'-O-methyluridine phosphorothioate
  modified_base 118: mod_base = OTHER; note = 2'-O-methyladenosine phosphorothioate
  modified_base 119: mod_base = OTHER; note = 2'-O-methyladenosine phosphorothioate
  modified_base 120: mod_base = OTHER; note = 2'-O-methyladenosine
gttctgtcttttggtcaggacaaccgtctagctataagtgctgcagggtgtgagaaactcctattgctggacgatgtctcttacgnggcattagcacaaccaacagcatagtcaaataaa

SEQ ID NO: 71 - RNA, 120 nt, synthetic construct; identical to SEQ ID NO: 60
  source 1..120: mol_type = other RNA; note = Description of Artificial Sequence: Synthetic polynucleotide
  modified_base 1: mod_base = OTHER; note = 2'-O-methylguanosine phosphorothioate
  modified_base 2: mod_base = OTHER; note = 2'-O-methyluridine phosphorothioate
  modified_base 3: mod_base = OTHER; note = 2'-O-methyluridine phosphorothioate
  modified_base 5: mod_base = OTHER; note = 2'-O-methyluridine
  modified_base 16: mod_base = OTHER; note = 2'-O-methylcytidine
  modified_base 21: mod_base = OTHER; note = 2'-O-methylcytidine
  modified_base 22: mod_base = OTHER; note = Nebularine
  modified_base 25: mod_base = OTHER; note = 2'-O-methylcytidine
  modified_base 26: mod_base = OTHER; note = 2'-O-methylguanosine
  modified_base 29: mod_base = OTHER; note = 2'-O-methyluridine
  modified_base 30: mod_base = OTHER; note = 2'-O-methyladenosine
  modified_base 44: mod_base = OTHER; note = 2'-O-methylcytidine
  modified_base 45: mod_base = OTHER; note = 2'-O-methyladenosine
  modified_base 49: mod_base = OTHER; note = 2'-O-methyluridine
  modified_base 50: mod_base = OTHER; note = 2'-O-methylguanosine
  modified_base 56: mod_base = OTHER; note = Nebularine
  modified_base 62: mod_base = OTHER; note = 2'-O-methyluridine
  modified_base 63: mod_base = OTHER; note = 2'-O-methyladenosine
  modified_base 67: mod_base = OTHER; note = 2'-O-methylcytidine
  modified_base 68: mod_base = OTHER; note = 2'-O-methyluridine
  modified_base 69: mod_base = OTHER; note = 2'-O-methylguanosine
  modified_base 72: mod_base = OTHER; note = 2'-O-methylcytidine
  modified_base 75: mod_base = OTHER; note = 2'-O-methyluridine
  modified_base 76: mod_base = OTHER; note = 2'-O-methylguanosine
  modified_base 79: mod_base = OTHER; note = 2'-O-methyluridine
  modified_base 82: mod_base = OTHER; note = 2'-O-methyluridine
  modified_base 83: mod_base = OTHER; note = 2'-O-methyladenosine
  modified_base 84: mod_base = OTHER; note = 2'-O-methylcytidine
  modified_base 117: mod_base = OTHER; note = 2'-O-methyluridine
  modified_base 118: mod_base = OTHER; note = 2'-O-methyladenosine phosphorothioate
  modified_base 119: mod_base = OTHER; note = 2'-O-methyladenosine phosphorothioate
  modified_base 120: mod_base = OTHER; note = 2'-O-methyladenosine

SEQ ID NO: 72 - RNA, 120 nt, synthetic construct; identical to SEQ ID NO: 61
  source 1..120: mol_type = other RNA; note = Description of Artificial Sequence: Synthetic polynucleotide
  modified_base 1: mod_base = OTHER; note = 2'-O-methylguanosine phosphorothioate
  modified_base 2: mod_base = OTHER; note = 2'-O-methyluridine phosphorothioate
  modified_base 3: mod_base = OTHER; note = 2'-O-methyluridine phosphorothioate
  modified_base 5: mod_base = OTHER; note = 2'-O-methyluridine
  modified_base 16: mod_base = OTHER; note = 2'-O-methylcytidine
  modified_base 21: mod_base = OTHER; note = 2'-O-methylcytidine
  modified_base 23: mod_base = OTHER; note = Nebularine
  modified_base 25: mod_base = OTHER; note = 2'-O-methylcytidine
  modified_base 26: mod_base = OTHER; note = 2'-O-methylguanosine
  modified_base 29: mod_base = OTHER; note = 2'-O-methyluridine
  modified_base 30: mod_base = OTHER; note = 2'-O-methylnebularine
  modified_base 44: mod_base = OTHER; note = 2'-O-methylcytidine
  modified_base 45: mod_base = OTHER; note = 2'-O-methylnebularine
  modified_base 49: mod_base = OTHER; note = 2'-O-methyluridine
  modified_base 50: mod_base = OTHER; note = 2'-O-methylguanosine
  modified_base 62: mod_base = OTHER; note = 2'-O-methyluridine
  modified_base 63: mod_base = OTHER; note = 2'-O-methyladenosine
  modified_base 67: mod_base = OTHER; note = 2'-O-methylcytidine
  modified_base 68: mod_base = OTHER; note = 2'-O-methyluridine
  modified_base 69: mod_base = OTHER; note = 2'-O-methylguanosine
  modified_base 72: mod_base = OTHER; note = 2'-O-methylcytidine
  modified_base 75: mod_base = OTHER; note = 2'-O-methyluridine
  modified_base 76: mod_base = OTHER; note = 2'-O-methylguanosine
  modified_base 79: mod_base = OTHER; note = 2'-O-methyluridine
  modified_base 82: mod_base = OTHER; note = 2'-O-methyluridine
  modified_base 83: mod_base = OTHER; note = 2'-O-methyladenosine
  modified_base 84: mod_base = OTHER; note = 2'-O-methylcytidine
  modified_base 117: mod_base = OTHER; note = 2'-O-methyluridine
  modified_base 118: mod_base = OTHER; note = 2'-O-methyladenosine phosphorothioate
  modified_base 119: mod_base = OTHER; note = 2'-O-methyladenosine phosphorothioate
  modified_base 120: mod_base = OTHER; note = 2'-O-methyladenosine

SEQ ID NO: 73 - RNA, 120 nt, synthetic construct; identical to SEQ ID NO: 62
  source 1..120: mol_type = other RNA; note = Description of Artificial Sequence: Synthetic polynucleotide
  modified_base 1: mod_base = OTHER; note = 2'-O-methylguanosine phosphorothioate
  modified_base 2: mod_base = OTHER; note = 2'-O-methyluridine phosphorothioate
  modified_base 3: mod_base = OTHER; note = 2'-O-methyluridine phosphorothioate
  modified_base 5: mod_base = OTHER; note = 2'-O-methyluridine
  modified_base 16: mod_base = OTHER; note = 2'-O-methylcytidine
  modified_base 21: mod_base = OTHER; note = 2'-O-methylcytidine
  modified_base 25: mod_base = OTHER; note = 2'-O-methylcytidine
  modified_base 26: mod_base = OTHER; note = 2'-O-methylguanosine
  modified_base 29: mod_base = OTHER; note = 2'-O-methyluridine
  modified_base 30: mod_base = OTHER; note = 2'-O-methyladenosine
  modified_base 34: mod_base = OTHER; note = Nebularine
  modified_base 44: mod_base = OTHER; note = 2'-O-methylcytidine
  modified_base 45: mod_base = OTHER; note = 2'-O-methyladenosine
  modified_base 49: mod_base = OTHER; note = 2'-O-methyluridine
  modified_base 50: mod_base = OTHER; note = 2'-O-methylguanosine
  modified_base 62: mod_base = OTHER; note = 2'-O-methyluridine
  modified_base 63: mod_base = OTHER; note = 2'-O-methylnebularine
  modified_base 67: mod_base = OTHER; note = 2'-O-methylcytidine
  modified_base 68: mod_base = OTHER; note = 2'-O-methyluridine
  modified_base 69: mod_base = OTHER; note = 2'-O-methylguanosine
  modified_base 72: mod_base = OTHER; note = 2'-O-methylcytidine
  modified_base 75: mod_base = OTHER; note = 2'-O-methyluridine
  modified_base 76: mod_base = OTHER; note = 2'-O-methylguanosine
  modified_base 79: mod_base = OTHER; note = 2'-O-methyluridine
  modified_base 82: mod_base = OTHER; note = 2'-O-methyluridine
  modified_base 83: mod_base = OTHER; note = 2'-O-methyladenosine
  modified_base 84: mod_base = OTHER; note = 2'-O-methylcytidine
  modified_base 117: mod_base = OTHER; note = 2'-O-methyluridine
  modified_base 118: mod_base = OTHER; note = 2'-O-methyladenosine phosphorothioate
  modified_base 119: mod_base = OTHER; note = 2'-O-methyladenosine phosphorothioate
  modified_base 120: mod_base = OTHER; note = 2'-O-methyladenosine

SEQ ID NO: 74 - RNA, 120 nt, synthetic construct; identical to SEQ ID NO: 49
  source 1..120: mol_type = other RNA; note = Description of Artificial Sequence: Synthetic polynucleotide
  modified_base 1: mod_base = OTHER; note = 2'-O-methylguanosine phosphorothioate
  modified_base 2: mod_base = OTHER; note = 2'-O-methyluridine phosphorothioate
  modified_base 3: mod_base = OTHER; note = 2'-O-methyluridine phosphorothioate
  modified_base 5: mod_base = OTHER; note = 2'-O-methyluridine
  modified_base 16: mod_base = OTHER; note = 2'-O-methylcytidine
  modified_base 21: mod_base = OTHER; note = 2'-O-methylcytidine
  modified_base 25: mod_base = OTHER; note = 2'-O-methylcytidine
  modified_base 26: mod_base = OTHER; note = 2'-O-methylguanosine
  modified_base 29: mod_base = OTHER; note = 2'-O-methyluridine
  modified_base 30: mod_base = OTHER; note = 2'-O-methyladenosine
  modified_base 36: mod_base = OTHER; note = Nebularine
  modified_base 44: mod_base = OTHER; note = 2'-O-methylcytidine
  modified_base 45: mod_base = OTHER; note = 2'-O-methyladenosine
  modified_base 49: mod_base = OTHER; note = 2'-O-methyluridine
  modified_base 50: mod_base = OTHER; note = 2'-O-methylguanosine
  modified_base 62: mod_base = OTHER; note = 2'-O-methyluridine
  modified_base 63: mod_base = OTHER; note = 2'-O-methyladenosine
  modified_base 67: mod_base = OTHER; note = 2'-O-methylcytidine
  modified_base 68: mod_base = OTHER; note = 2'-O-methyluridine
  modified_base 69: mod_base = OTHER; note = 2'-O-methylguanosine
  modified_base 72: mod_base = OTHER; note = 2'-O-methylcytidine
  modified_base 75: mod_base = OTHER; note = 2'-O-methyluridine
  modified_base 76: mod_base = OTHER; note = 2'-O-methylguanosine
  modified_base 79: mod_base = OTHER; note = 2'-O-methyluridine
  modified_base 82: mod_base = OTHER; note = 2'-O-methyluridine
  modified_base 83: mod_base = OTHER; note = 2'-O-methyladenosine
  modified_base 84: mod_base = OTHER; note = 2'-O-methylcytidine
  modified_base 117: mod_base = OTHER; note = 2'-O-methyluridine
  modified_base 118: mod_base = OTHER; note = 2'-O-methyladenosine phosphorothioate
  modified_base 119: mod_base = OTHER; note = 2'-O-methyladenosine phosphorothioate
  modified_base 120: mod_base = OTHER; note = 2'-O-methyladenosine

SEQ ID NO: 75 - RNA, 120 nt, synthetic construct; identical to SEQ ID NO: 63
  source 1..120: mol_type = other RNA; note = Description of Artificial Sequence: Synthetic polynucleotide
  modified_base 1: mod_base = OTHER; note = 2'-O-methylguanosine phosphorothioate
  modified_base 2: mod_base = OTHER; note = 2'-O-methyluridine phosphorothioate
  modified_base 3: mod_base = OTHER; note = 2'-O-methyluridine phosphorothioate
  modified_base 5: mod_base = OTHER; note = 2'-O-methyluridine
  modified_base 16: mod_base = OTHER; note = 2'-O-methylcytidine
  modified_base 21: mod_base = OTHER; note = 2'-O-methylcytidine
  modified_base 25: mod_base = OTHER; note = 2'-O-methylcytidine
  modified_base 26: mod_base = OTHER; note = 2'-O-methylguanosine
  modified_base 29: mod_base = OTHER; note = 2'-O-methyluridine
  modified_base 30: mod_base = OTHER; note = 2'-O-methyladenosine
  modified_base 37: mod_base = OTHER; note = Nebularine
  modified_base 44: mod_base = OTHER; note = 2'-O-methylcytidine
  modified_base 45: mod_base = OTHER; note = 2'-O-methyladenosine
  modified_base 49: mod_base = OTHER; note = 2'-O-methyluridine
  modified_base 50: mod_base = OTHER; note = 2'-O-methylguanosine
  modified_base 62: mod_base = OTHER; note = 2'-O-methyluridine
  modified_base 63: mod_base = OTHER; note = 2'-O-methyladenosine
  modified_base 67: mod_base = OTHER; note = 2'-O-methylcytidine
  modified_base 68: mod_base = OTHER; note = 2'-O-methyluridine
  modified_base 69: mod_base = OTHER; note = 2'-O-methylguanosine
  modified_base 71: mod_base = OTHER; note = Nebularine
  modified_base 72: mod_base = OTHER; note = 2'-O-methylcytidine
  modified_base 75: mod_base = OTHER; note = 2'-O-methyluridine
  modified_base 76: mod_base = OTHER; note = 2'-O-methylguanosine
  modified_base 79: mod_base = OTHER; note = 2'-O-methyluridine
  modified_base 82: mod_base = OTHER; note = 2'-O-methyluridine
  modified_base 83: mod_base = OTHER; note = 2'-O-methyladenosine
  modified_base 84: mod_base = OTHER; note = 2'-O-methylcytidine
  modified_base 117: mod_base = OTHER; note = 2'-O-methyluridine
  modified_base 118: mod_base = OTHER; note = 2'-O-methyladenosine phosphorothioate
  modified_base 119: mod_base = OTHER; note = 2'-O-methyladenosine phosphorothioate
  modified_base 120: mod_base = OTHER; note = 2'-O-methyladenosine

SEQ ID NO: 76 - RNA, 120 nt, synthetic construct; identical to SEQ ID NO: 51
  source 1..120: mol_type = other RNA; note = Description of Artificial Sequence: Synthetic polynucleotide
  modified_base 1: mod_base = OTHER; note = 2'-O-methylguanosine phosphorothioate
  modified_base 2: mod_base = OTHER; note = 2'-O-methyluridine phosphorothioate
  modified_base 3: mod_base = OTHER; note = 2'-O-methyluridine phosphorothioate
  modified_base 5: mod_base = OTHER; note = 2'-O-methyluridine
  modified_base 16: mod_base = OTHER; note = 2'-O-methylcytidine
  modified_base 21: mod_base = OTHER; note = 2'-O-methylcytidine
  modified_base 25: mod_base = OTHER; note = 2'-O-methylcytidine
  modified_base 26: mod_base = OTHER; note = 2'-O-methylguanosine
  modified_base 29: mod_base = OTHER; note = 2'-O-methyluridine
  modified_base 30: mod_base = OTHER; note = 2'-O-methyladenosine
  modified_base 44: mod_base = OTHER; note = 2'-O-methylcytidine
  modified_base 45: mod_base = OTHER; note = 2'-O-methyladenosine
  modified_base 49: mod_base = OTHER; note = 2'-O-methyluridine
  modified_base 50: mod_base = OTHER; note = 2'-O-methylguanosine
  modified_base 53: mod_base = OTHER; note = Nebularine
  modified_base 62: mod_base = OTHER; note = 2'-O-methyluridine
  modified_base 63: mod_base = OTHER; note = 2'-O-methyladenosine
  modified_base 67: mod_base = OTHER; note = 2'-O-methylcytidine
  modified_base 68: mod_base = OTHER; note = 2'-O-methyluridine
  modified_base 69: mod_base = OTHER; note = 2'-O-methylguanosine
  modified_base 72: mod_base = OTHER; note = 2'-O-methylcytidine
  modified_base 75: mod_base = OTHER; note = 2'-O-methyluridine
  modified_base 76: mod_base = OTHER; note = 2'-O-methylguanosine
  modified_base 79: mod_base = OTHER; note = 2'-O-methyluridine
  modified_base 82: mod_base = OTHER; note = 2'-O-methyluridine
  modified_base 83: mod_base = OTHER; note = 2'-O-methyladenosine
  modified_base 84: mod_base = OTHER; note = 2'-O-methylcytidine
  modified_base 117: mod_base = OTHER; note = 2'-O-methyluridine
  modified_base 118: mod_base = OTHER; note = 2'-O-methyladenosine phosphorothioate
  modified_base 119: mod_base = OTHER; note = 2'-O-methyladenosine phosphorothioate
  modified_base 120: mod_base = OTHER; note = 2'-O-methyladenosine

SEQ ID NO: 77 - RNA, 120 nt, synthetic construct; identical to SEQ ID NO: 64
  source 1..120: mol_type = other RNA; note = Description of Artificial Sequence: Synthetic polynucleotide
  modified_base 1: mod_base = OTHER; note = 2'-O-methylguanosine phosphorothioate
  modified_base 2: mod_base = OTHER; note = 2'-O-methyluridine phosphorothioate
  modified_base 3: mod_base = OTHER; note = 2'-O-methyluridine phosphorothioate
  modified_base 5: mod_base = OTHER; note = 2'-O-methyluridine
  modified_base 16: mod_base = OTHER; note = 2'-O-methylcytidine
  modified_base 21: mod_base = OTHER; note = 2'-O-methylcytidine
  modified_base 25: mod_base = OTHER; note = 2'-O-methylcytidine
  modified_base 26: mod_base = OTHER; note = 2'-O-methylguanosine
  modified_base 29: mod_base = OTHER; note = 2'-O-methyluridine
  modified_base 30: mod_base = OTHER; note = 2'-O-methylnebularine
  modified_base 44: mod_base = OTHER; note = 2'-O-methylcytidine
  modified_base 45: mod_base = OTHER; note = 2'-O-methyladenosine
  modified_base 49: mod_base = OTHER; note = 2'-O-methyluridine
  modified_base 50: mod_base = OTHER; note = 2'-O-methylguanosine
  modified_base 55: mod_base = OTHER; note = Nebularine
  modified_base 62: mod_base = OTHER; note = 2'-O-methyluridine
  modified_base 63: mod_base = OTHER; note = 2'-O-methyladenosine
  modified_base 67: mod_base = OTHER; note = 2'-O-methylcytidine
  modified_base 68: mod_base = OTHER; note = 2'-O-methyluridine
  modified_base 69: mod_base = OTHER; note = 2'-O-methylguanosine
  modified_base 72: mod_base = OTHER; note = 2'-O-methylcytidine
  modified_base 75: mod_base = OTHER; note = 2'-O-methyluridine
  modified_base 76: mod_base = OTHER; note = 2'-O-methylguanosine
  modified_base 79: mod_base = OTHER; note = 2'-O-methyluridine
  modified_base 82: mod_base = OTHER; note = 2'-O-methyluridine
  modified_base 83: mod_base = OTHER; note = 2'-O-methyladenosine
  modified_base 84: mod_base = OTHER; note = 2'-O-methylcytidine
  modified_base 117: mod_base = OTHER; note = 2'-O-methyluridine
  modified_base 118: mod_base = OTHER; note = 2'-O-methyladenosine phosphorothioate
  modified_base 119: mod_base = OTHER; note = 2'-O-methyladenosine phosphorothioate
  modified_base 120: mod_base = OTHER; note = 2'-O-methyladenosine

SEQ ID NO: 78 - RNA, 120 nt, synthetic construct; identical to SEQ ID NO: 65
  source 1..120: mol_type = other RNA; note = Description of Artificial Sequence: Synthetic polynucleotide
  modified_base 1: mod_base = OTHER; note = 2'-O-methylguanosine phosphorothioate
  modified_base 2: mod_base = OTHER; note = 2'-O-methyluridine phosphorothioate
  modified_base 3: mod_base = OTHER; note = 2'-O-methyluridine phosphorothioate
  modified_base 5: mod_base = OTHER; note = 2'-O-methyluridine
  modified_base 16: mod_base = OTHER; note = 2'-O-methylcytidine
  modified_base 21: mod_base = OTHER; note = 2'-O-methylcytidine
  modified_base 25: mod_base = OTHER; note = 2'-O-methylcytidine
  modified_base 26: mod_base = OTHER; note = 2'-O-methylguanosine
  modified_base 29: mod_base = OTHER; note = 2'-O-methyluridine
  modified_base 30: mod_base = OTHER; note = 2'-O-methylnebularine
  modified_base 44: mod_base = OTHER; note = 2'-O-methylcytidine
  modified_base 45: mod_base = OTHER; note = 2'-O-methylnebularine
  modified_base 49: mod_base = OTHER; note = 2'-O-methyluridine
  modified_base 50: mod_base = OTHER; note = 2'-O-methylguanosine
  modified_base 56: mod_base = OTHER; note = Nebularine
  modified_base 62: mod_base = OTHER; note = 2'-O-methyluridine
  modified_base 63: mod_base = OTHER; note = 2'-O-methyladenosine
  modified_base 67: mod_base = OTHER; note = 2'-O-methylcytidine
  modified_base 68: mod_base = OTHER; note = 2'-O-methyluridine
  modified_base 69: mod_base = OTHER; note = 2'-O-methylguanosine
  modified_base 72: mod_base = OTHER; note = 2'-O-methylcytidine
  modified_base 75: mod_base = OTHER; note = 2'-O-methyluridine
  modified_base 76: mod_base = OTHER; note = 2'-O-methylguanosine
  modified_base 79: mod_base = OTHER; note = 2'-O-methyluridine
  modified_base 82: mod_base = OTHER; note = 2'-O-methyluridine
  modified_base 83: mod_base = OTHER; note = 2'-O-methyladenosine
  modified_base 84: mod_base = OTHER; note = 2'-O-methylcytidine
  modified_base 117: mod_base = OTHER; note = 2'-O-methyluridine
  modified_base 118: mod_base = OTHER; note = 2'-O-methyladenosine phosphorothioate
  modified_base 119: mod_base = OTHER; note = 2'-O-methyladenosine phosphorothioate
  modified_base 120: mod_base = OTHER; note = 2'-O-methyladenosine

SEQ ID NO: 79 - RNA, 120 nt, synthetic construct; identical to SEQ ID NO: 66
  source 1..120: mol_type = other RNA; note = Description of Artificial Sequence: Synthetic polynucleotide
  modified_base 1: mod_base = OTHER; note = 2'-O-methylguanosine phosphorothioate
  modified_base 2: mod_base = OTHER; note = 2'-O-methyluridine phosphorothioate
  modified_base 3: mod_base = OTHER; note = 2'-O-methyluridine phosphorothioate
  modified_base 5: mod_base = OTHER; note = 2'-O-methyluridine
  modified_base 16: mod_base = OTHER; note = 2'-O-methylcytidine
  modified_base 21: mod_base = OTHER; note = 2'-O-methylcytidine
  modified_base 23: mod_base = OTHER; note = Nebularine
  modified_base 25: mod_base = OTHER; note = 2'-O-methylcytidine
  modified_base 26: mod_base = OTHER; note = 2'-O-methylguanosine
  modified_base 29: mod_base = OTHER; note = 2'-O-methyluridine
  modified_base 30: mod_base = OTHER; note = 2'-O-methyladenosine
  modified_base 44: mod_base = OTHER; note = 2'-O-methylcytidine
  modified_base 45: mod_base = OTHER; note = 2'-O-methyladenosine
  modified_base 49: mod_base = OTHER; note = 2'-O-methyluridine
  modified_base 50: mod_base = OTHER; note = 2'-O-methylguanosine
  modified_base 57: mod_base = OTHER; note = Nebularine
  modified_base 62: mod_base = OTHER; note = 2'-O-methyluridine
  modified_base 63: mod_base = OTHER; note = 2'-O-methyladenosine
  modified_base 67: mod_base = OTHER; note = 2'-O-methylcytidine
  modified_base 68: mod_base = OTHER; note = 2'-O-methyluridine
  modified_base 69: mod_base = OTHER; note = 2'-O-methylguanosine
  modified_base 72: mod_base = OTHER; note = 2'-O-methylcytidine
  modified_base 75: mod_base = OTHER; note = 2'-O-methyluridine
  modified_base 76: mod_base = OTHER; note = 2'-O-methylguanosine
  modified_base 79: mod_base = OTHER; note = 2'-O-methyluridine
  modified_base 82: mod_base = OTHER; note = 2'-O-methyluridine
  modified_base 83: mod_base = OTHER; note = 2'-O-methyladenosine
  modified_base 84: mod_base = OTHER; note = 2'-O-methylcytidine
  modified_base 117: mod_base = OTHER; note = 2'-O-methyluridine
  modified_base 118: mod_base = OTHER; note = 2'-O-methyladenosine phosphorothioate
  modified_base 119: mod_base = OTHER; note = 2'-O-methyladenosine phosphorothioate
  modified_base 120: mod_base = OTHER; note = 2'-O-methyladenosine

SEQ ID NO: 80 - RNA, 120 nt, synthetic construct; identical to SEQ ID NO: 67
  source 1..120: mol_type = other RNA; note = Description of Artificial Sequence: Synthetic polynucleotide
  modified_base 1: mod_base = OTHER; note = 2'-O-methylguanosine phosphorothioate
  modified_base 2: mod_base = OTHER; note = 2'-O-methyluridine phosphorothioate
  modified_base 3: mod_base = OTHER; note = 2'-O-methyluridine phosphorothioate
  modified_base 5: mod_base = OTHER; note = 2'-O-methyluridine
  modified_base 16: mod_base = OTHER; note = 2'-O-methylcytidine
  modified_base 21: mod_base = OTHER; note = 2'-O-methylcytidine
  modified_base 25: mod_base = OTHER; note = 2'-O-methylcytidine
  modified_base 26: mod_base = OTHER; note = 2'-O-methylguanosine
  modified_base 29: mod_base = OTHER; note = 2'-O-methyluridine
  modified_base 30: mod_base = OTHER; note = 2'-O-methyladenosine
  modified_base 44: mod_base = OTHER; note = 2'-O-methylcytidine
  modified_base 45: mod_base = OTHER; note = 2'-O-methyladenosine
  modified_base 49: mod_base = OTHER; note = 2'-O-methyluridine
  modified_base 50: mod_base = OTHER; note = 2'-O-methylguanosine
  modified_base 62: mod_base = OTHER; note = 2'-O-methyluridine
  modified_base 63: mod_base = OTHER; note = 2'-O-methyladenosine
  modified_base 67: mod_base = OTHER; note = 2'-O-methylcytidine
  modified_base 68: mod_base = OTHER; note = 2'-O-methyluridine
  modified_base 69: mod_base = OTHER; note = 2'-O-methylguanosine
  modified_base 71: mod_base = OTHER; note = Nebularine
  modified_base 72: mod_base = OTHER; note = 2'-O-methylcytidine
  modified_base 75: mod_base = OTHER; note = 2'-O-methyluridine
  modified_base 76: mod_base = OTHER; note = 2'-O-methylguanosine
  modified_base 79: mod_base = OTHER; note = 2'-O-methyluridine
  modified_base 82: mod_base = OTHER; note = 2'-O-methyluridine
  modified_base 83: mod_base = OTHER; note = 2'-O-methylnebularine
  modified_base 84: mod_base = OTHER; note = 2'-O-methylcytidine
  modified_base 117: mod_base = OTHER; note = 2'-O-methyluridine
  modified_base 118: mod_base = OTHER; note = 2'-O-methyladenosine phosphorothioate
  modified_base 119: mod_base = OTHER; note = 2'-O-methyladenosine phosphorothioate
  modified_base 120: mod_base = OTHER; note = 2'-O-methyladenosine

SEQ ID NO: 81 - RNA, 120 nt, synthetic construct; identical to SEQ ID NO: 68
  source 1..120: mol_type = other RNA; note = Description of Artificial Sequence: Synthetic polynucleotide
  modified_base 1: mod_base = OTHER; note = 2'-O-methylguanosine phosphorothioate
  modified_base 2: mod_base = OTHER; note = 2'-O-methyluridine phosphorothioate
  modified_base 3: mod_base = OTHER; note = 2'-O-methyluridine phosphorothioate
  modified_base 5: mod_base = OTHER; note = 2'-O-methyluridine
  modified_base 16: mod_base = OTHER; note = 2'-O-methylcytidine
  modified_base 21: mod_base = OTHER; note = 2'-O-methylcytidine
  modified_base 25: mod_base = OTHER; note = 2'-O-methylcytidine
  modified_base 26: mod_base = OTHER; note = 2'-O-methylguanosine
  modified_base 29: mod_base = OTHER; note = 2'-O-methyluridine
  modified_base 30: mod_base = OTHER; note = 2'-O-methylnebularine
  modified_base 44: mod_base = OTHER; note = 2'-O-methylcytidine
  modified_base 45: mod_base = OTHER; note = 2'-O-methylnebularine
  modified_base 49: mod_base = OTHER; note = 2'-O-methyluridine
  modified_base 50: mod_base = OTHER; note = 2'-O-methylguanosine
  modified_base 62: mod_base = OTHER; note = 2'-O-methyluridine
  modified_base 63: mod_base = OTHER; note = 2'-O-methylnebularine
  modified_base 67: mod_base = OTHER; note = 2'-O-methylcytidine
  modified_base 68: mod_base = OTHER; note = 2'-O-methyluridine
  modified_base 69: mod_base = OTHER; note = 2'-O-methylguanosine
  modified_base 72: mod_base = OTHER; note = 2'-O-methylcytidine
  modified_base 75: mod_base = OTHER; note = 2'-O-methyluridine
  modified_base 76: mod_base = OTHER; note = 2'-O-methylguanosine
  modified_base 79: mod_base = OTHER; note = 2'-O-methyluridine
  modified_base 82: mod_base = OTHER; note = 2'-O-methyluridine
  modified_base 83: mod_base = OTHER; note = 2'-O-methylnebularine
  modified_base 84: mod_base = OTHER; note = 2'-O-methylcytidine
  modified_base 117: mod_base = OTHER; note = 2'-O-methyluridine
  modified_base 118: mod_base = OTHER; note = 2'-O-methyladenosine phosphorothioate
  modified_base 119: mod_base = OTHER; note = 2'-O-methyladenosine phosphorothioate
  modified_base 120: mod_base = OTHER; note = 2'-O-methyladenosine

SEQ ID NO: 82 - RNA, 120 nt, synthetic construct; identical to SEQ ID NO: 69
  source 1..120: mol_type = other RNA; note = Description of Artificial Sequence: Synthetic polynucleotide
  modified_base 1: mod_base = OTHER; note = 2'-O-methylguanosine phosphorothioate
  modified_base 2: mod_base = OTHER; note = 2'-O-methyluridine phosphorothioate
  modified_base 3: mod_base = OTHER; note = 2'-O-methyluridine phosphorothioate
  modified_base 5: mod_base = OTHER; note = 2'-O-methyluridine
  modified_base 16: mod_base = OTHER; note = 2'-O-methylcytidine
  modified_base 21: mod_base = OTHER; note = 2'-O-methylcytidine
  modified_base 25: mod_base = OTHER; note = 2'-O-methylcytidine
  modified_base 26: mod_base = OTHER; note = 2'-O-methylguanosine
  modified_base 29: mod_base = OTHER; note = 2'-O-methyluridine
  modified_base 30: mod_base = OTHER; note = 2'-O-methyladenosine
  modified_base 44: mod_base = OTHER; note = 2'-O-methylcytidine
  modified_base 45: mod_base = OTHER; note = 2'-O-methyladenosine
  modified_base 49: mod_base = OTHER; note = 2'-O-methyluridine
  modified_base 50: mod_base = OTHER; note = 2'-O-methylguanosine
  modified_base 62: mod_base = OTHER; note = 2'-O-methyluridine
  modified_base 63: mod_base = OTHER; note = 2'-O-methyladenosine
  modified_base 67: mod_base = OTHER; note = 2'-O-methylcytidine
  modified_base 68: mod_base = OTHER; note = 2'-O-methyluridine
  modified_base 69: mod_base = OTHER; note = 2'-O-methylguanosine
  modified_base 72: mod_base = OTHER; note = 2'-O-methylcytidine
  modified_base 75: mod_base = OTHER; note = 2'-O-methyluridine
  modified_base 76: mod_base = OTHER; note = 2'-O-methylguanosine
  modified_base 79: mod_base = OTHER; note = 2'-O-methyluridine
  modified_base 82: mod_base = OTHER; note = 2'-O-methyluridine
  modified_base 83: mod_base = OTHER; note = 2'-O-methylnebularine
  modified_base 84: mod_base = OTHER; note = 2'-O-methylcytidine
  modified_base 117: mod_base = OTHER; note = 2'-O-methyluridine
  modified_base 118: mod_base = OTHER; note = 2'-O-methyladenosine phosphorothioate
  modified_base 119: mod_base = OTHER; note = 2'-O-methyladenosine phosphorothioate
  modified_base 120: mod_base = OTHER; note = 2'-O-methyladenosine

SEQ ID NO: 83 - RNA, 120 nt, synthetic construct; identical to SEQ ID NO: 70
  source 1..120: mol_type = other RNA; note = Description of Artificial Sequence: Synthetic polynucleotide
  modified_base 1: mod_base = OTHER; note = 2'-O-methylguanosine phosphorothioate
  modified_base 2: mod_base = OTHER; note = 2'-O-methyluridine phosphorothioate
  modified_base 3: mod_base = OTHER; note = 2'-O-methyluridine phosphorothioate
  modified_base 5: mod_base = OTHER; note = 2'-O-methyluridine
  modified_base 16: mod_base = OTHER; note = 2'-O-methylcytidine
  modified_base 21: mod_base = OTHER; note = 2'-O-methylcytidine
  modified_base 25: mod_base = OTHER; note = 2'-O-methylcytidine
  modified_base 26: mod_base = OTHER; note = 2'-O-methylguanosine
  modified_base 29: mod_base = OTHER; note = 2'-O-methyluridine
  modified_base 30: mod_base = OTHER; note = 2'-O-methyladenosine
  modified_base 44: mod_base = OTHER; note = 2'-O-methylcytidine
  modified_base 45: mod_base = OTHER; note = 2'-O-methyladenosine
  modified_base 49: mod_base = OTHER; note = 2'-O-methyluridine
  modified_base 50: mod_base = OTHER; note = 2'-O-methylguanosine
  modified_base 62: mod_base = OTHER; note = 2'-O-methyluridine
  modified_base 63: mod_base = OTHER; note = 2'-O-methyladenosine
  modified_base 67: mod_base = OTHER; note = 2'-O-methylcytidine
  modified_base 68: mod_base = OTHER; note = 2'-O-methyluridine
  modified_base 69: mod_base = OTHER; note = 2'-O-methylguanosine
  modified_base 72: mod_base = OTHER; note = 2'-O-methylcytidine
  modified_base 75: mod_base = OTHER; note = 2'-O-methyluridine
  modified_base 76: mod_base = OTHER; note = 2'-O-methylguanosine
  modified_base 79: mod_base = OTHER; note = 2'-O-methyluridine
  modified_base 82: mod_base = OTHER; note = 2'-O-methyluridine
  modified_base 83: mod_base = OTHER; note = 2'-O-methyladenosine
  modified_base 84: mod_base = OTHER; note = 2'-O-methylcytidine
  modified_base 86: mod_base = OTHER; note = Nebularine
  modified_base 117: mod_base = OTHER; note = 2'-O-methyluridine
  modified_base 118: mod_base = OTHER; note = 2'-O-methyladenosine phosphorothioate
  modified_base 119: mod_base = OTHER; note = 2'-O-methyladenosine phosphorothioate
  modified_base 120: mod_base = OTHER; note = 2'-O-methyladenosine

SEQ ID NO: 84 - RNA, 120 nt, synthetic construct
  source 1..120: mol_type = other RNA; note = Description of Artificial Sequence: Synthetic polynucleotide
  modified_base 1: mod_base = OTHER; note = 2'-O-methylguanosine phosphorothioate
  modified_base 2: mod_base = OTHER; note = 2'-O-methyluridine phosphorothioate
  modified_base 3: mod_base = OTHER; note = 2'-O-methyluridine phosphorothioate
  modified_base 22: mod_base = OTHER; note = Nebularine
  modified_base 23: mod_base = OTHER; note = Nebularine
  modified_base 30: mod_base = OTHER; note = Nebularine
  modified_base 34: mod_base = OTHER; note = Nebularine
  modified_base 36: mod_base = OTHER; note = Nebularine
  modified_base 37: mod_base = OTHER; note = Nebularine
  modified_base 45: mod_base = OTHER; note = Nebularine
  modified_base 53: mod_base = OTHER; note = Nebularine
  modified_base 55: mod_base = OTHER; note = Nebularine
  modified_base 56: mod_base = OTHER; note = Nebularine
  modified_base 57: mod_base = OTHER; note = Nebularine
  modified_base 63: mod_base = OTHER; note = Nebularine
  modified_base 71: mod_base = OTHER; note = Nebularine
  modified_base 74: mod_base = OTHER; note = Nebularine
  modified_base 83: mod_base = OTHER; note = Nebularine
  modified_base 86: mod_base = OTHER; note = Nebularine
  modified_base 90: mod_base = OTHER; note = Nebularine
  modified_base 93: mod_base = OTHER; note = Nebularine
  modified_base 96: mod_base = OTHER; note = Nebularine
  modified_base 98: mod_base = OTHER; note = Nebularine
  modified_base 99: mod_base = OTHER; note = Nebularine
  modified_base 102: mod_base = OTHER; note = Nebularine
  modified_base 103: mod_base = OTHER; note = Nebularine
  modified_base 105: mod_base = OTHER; note = Nebularine
  modified_base 108: mod_base = OTHER; note = Nebularine
  modified_base 110: mod_base = OTHER; note = Nebularine
  modified_base 114: mod_base = OTHER; note = Nebularine
  modified_base 115: mod_base = OTHER; note = Nebularine
  modified_base 116: mod_base = OTHER; note = Nebularine
  modified_base 117: mod_base = OTHER; note = 2'-O-methyluridine phosphorothioate
  modified_base 118: mod_base = OTHER; note = Nebularine phosphorothioate
  modified_base 119: mod_base = OTHER; note = Nebularine phosphorothioate
  modified_base 120: mod_base = OTHER; note = Nebularine
gttctgtcttttggtcaggacnnccgtctngctntnngtgctgcngggtgtgngnnnctcctnttgctggncgntgtctcttncgnggcnttngcncnnccnncngcntngtcnnntnnn

SEQ ID NO: 85 - RNA, 120 nt, synthetic construct
  source 1..120: mol_type = other RNA; note = Description of Artificial Sequence: Synthetic polynucleotide
  modified_base 1: mod_base = OTHER; note = 2'-O-methylguanosine phosphorothioate
  modified_base 2: mod_base = OTHER; note = 2'-O-methyluridine phosphorothioate
  modified_base 3: mod_base = OTHER; note = 2'-O-methyluridine phosphorothioate
  modified_base 22: mod_base = OTHER; note = Nebularine
  modified_base 23: mod_base = OTHER; note = Nebularine
  modified_base 36: mod_base = OTHER; note = Nebularine
  modified_base 37: mod_base = OTHER; note = Nebularine
  modified_base 53: mod_base = OTHER; note = Nebularine
  modified_base 55: mod_base = OTHER; note = Nebularine
  modified_base 56: mod_base = OTHER; note = Nebularine
  modified_base 83: mod_base = OTHER; note = Nebularine
  modified_base 117: mod_base = OTHER; note = 2'-O-methyluridine phosphorothioate
  modified_base 118: mod_base = OTHER; note = 2'-O-methyladenosine phosphorothioate
  modified_base 119: mod_base = OTHER; note = 2'-O-methyladenosine phosphorothioate
  modified_base 120: mod_base = OTHER; note = 2'-O-methyladenosine
gttctgtcttttggtcaggacnnccgtctagctatnngtgctgcagggtgtgngnnactcctattgctggacgatgtctcttncgaggcattagcacaaccaacagcatagtcaaataaa

SEQ ID NO: 86 - RNA, 120 nt, synthetic construct
  source 1..120: mol_type = other RNA; note = Description of Artificial Sequence: Synthetic polynucleotide
  modified_base 1: mod_base = OTHER; note = 2'-O-methylguanosine phosphorothioate
  modified_base 2: mod_base = OTHER; note = 2'-O-methyluridine phosphorothioate
  modified_base 3: mod_base = OTHER; note = 2'-O-methyluridine phosphorothioate
  modified_base 17: mod_base = OTHER; note = 2'-O-methylnebularine
  modified_base 20: mod_base = OTHER; note = 2'-O-methylnebularine
  modified_base 22: mod_base = OTHER; note = 2'-O-methylnebularine
  modified_base 23: mod_base = OTHER; note = 2'-O-methylnebularine
  modified_base 30: mod_base = OTHER; note = 2'-O-methylnebularine
  modified_base 34: mod_base = OTHER; note = 2'-O-methylnebularine
  modified_base 36: mod_base = OTHER; note = 2'-O-methylnebularine
  modified_base 37: mod_base = OTHER; note = 2'-O-methylnebularine
  modified_base 45: mod_base = OTHER; note = 2'-O-methylnebularine
  modified_base 53: mod_base = OTHER; note = 2'-O-methylnebularine
  modified_base 55: mod_base = OTHER; note = 2'-O-methylnebularine
  modified_base 56: mod_base = OTHER; note = 2'-O-methylnebularine
  modified_base 57: mod_base = OTHER; note = 2'-O-methylnebularine
  modified_base 63: mod_base = OTHER; note = 2'-O-methylnebularine
  modified_base 71: mod_base = OTHER; note = 2'-O-methylnebularine
  modified_base 74: mod_base = OTHER; note = 2'-O-methylnebularine
  modified_base 83: mod_base = OTHER; note = 2'-O-methylnebularine
  modified_base 86: mod_base = OTHER; note = 2'-O-methylnebularine
  modified_base 90: mod_base = OTHER; note = 2'-O-methylnebularine
  modified_base 93: mod_base = OTHER; note = 2'-O-methylnebularine
  modified_base 96: mod_base = OTHER; note = 2'-O-methylnebularine
  modified_base 98: mod_base = OTHER; note = 2'-O-methylnebularine
  modified_base 99: mod_base = OTHER; note = 2'-O-methylnebularine
  modified_base 102: mod_base = OTHER; note = 2'-O-methylnebularine
  modified_base 103: mod_base = OTHER; note = 2'-O-methylnebularine
  modified_base 105: mod_base = OTHER; note = 2'-O-methylnebularine
  modified_base 108: mod_base = OTHER; note = 2'-O-methylnebularine
  modified_base 110: mod_base = OTHER; note = 2'-O-methylnebularine
  modified_base 114: mod_base = OTHER; note = 2'-O-methylnebularine
  modified_base 115: mod_base = OTHER; note = 2'-O-methylnebularine
  modified_base 116: mod_base = OTHER; note = 2'-O-methylnebularine
  modified_base 117: mod_base = OTHER; note = 2'-O-methyluridine phosphorothioate
  modified_base 118: mod_base = OTHER; note = 2'-O-methylnebularine phosphorothioate
  modified_base 119: mod_base = OTHER; note = 2'-O-methylnebularine phosphorothioate
  modified_base 120: mod_base = OTHER; note = 2'-O-methylnebularine
gttctgtcttttggtcnggncnnccgtctngctntnngtgctgcngggtgtgngnnnctcctnttgctggncgntgtctcttncgnggcnttngcncnnccnncngcntngtcnnntnnn

SEQ ID NO: 87 - RNA, 120 nt, synthetic construct
  source 1..120: mol_type = other RNA; note = Description of Artificial Sequence: Synthetic polynucleotide
  modified_base 1: mod_base = OTHER; note = 2'-O-methylguanosine phosphorothioate
  modified_base 2: mod_base = OTHER; note = 2'-O-methyluridine phosphorothioate
  modified_base 3: mod_base = OTHER; note = 2'-O-methyluridine phosphorothioate
  modified_base 5: mod_base = OTHER; note = 2'-O-methyluridine
  modified_base 16: mod_base = OTHER; note = 2'-O-methylcytidine
  modified_base 21: mod_base = OTHER; note = 2'-O-methylcytidine
  modified_base 25: mod_base = OTHER; note = 2'-O-methylcytidine
  modified_base 26: mod_base = OTHER; note = 2'-O-methylguanosine
  modified_base 29: mod_base = OTHER; note = 2'-O-methyluridine
  modified_base 30: mod_base = OTHER; note = 2'-O-methylnebularine
  modified_base 44: mod_base = OTHER; note = 2'-O-methylcytidine
  modified_base 45: mod_base = OTHER; note = 2'-O-methylnebularine
  modified_base 49: mod_base = OTHER; note = 2'-O-methyluridine
  modified_base 50: mod_base = OTHER; note = 2'-O-methylguanosine
  modified_base 62: mod_base = OTHER; note = 2'-O-methyluridine
  modified_base 63: mod_base = OTHER; note = 2'-O-methylnebularine
  modified_base 67: mod_base = OTHER; note = 2'-O-methylcytidine
  modified_base 68: mod_base = OTHER; note = 2'-O-methyluridine
  modified_base 69: mod_base = OTHER; note = 2'-O-methylguanosine
  modified_base 72: mod_base = OTHER; note = 2'-O-methylcytidine
  modified_base 75: mod_base = OTHER; note = 2'-O-methyluridine
  modified_base 76: mod_base = OTHER; note = 2'-O-methylguanosine
  modified_base 79: mod_base = OTHER; note = 2'-O-methyluridine
  modified_base 82: mod_base = OTHER; note = 2'-O-methyluridine
  modified_base 83: mod_base = OTHER; note = 2'-O-methylnebularine
  modified_base 84: mod_base = OTHER; note = 2'-O-methylcytidine
  modified_base 117: mod_base = OTHER; note = 2'-O-methyluridine phosphorothioate
  modified_base 118: mod_base = OTHER; note = 2'-O-methylnebularine phosphorothioate
  modified_base 119: mod_base = OTHER; note = 2'-O-methylnebularine phosphorothioate
  modified_base 120: mod_base = OTHER; note = 2'-O-methylnebularine
gttctgtcttttggtcaggacaaccgtctngctataagtgctgcngggtgtgagaaactcctnttgctggacgatgtctcttncgaggcattagcacaaccaacagcatagtcaaatnnn

SEQ ID NO: 88 - RNA, 120 nt, synthetic construct
  source 1..120: mol_type = other RNA; note = Description of Artificial Sequence: Synthetic polynucleotide
  modified_base 1: mod_base = OTHER; note = 2'-O-methylguanosine phosphorothioate
  modified_base 2: mod_base = OTHER; note = 2'-O-methyluridine phosphorothioate
  modified_base 3: mod_base = OTHER; note = 2'-O-methyluridine phosphorothioate
  modified_base 5: mod_base = OTHER; note = 2'-O-methyluridine
  modified_base 16: mod_base = OTHER; note = 2'-O-methylcytidine
  modified_base 17: mod_base = OTHER; note = Nebularine
  modified_base 21: mod_base = OTHER; note = 2'-O-methylcytidine
  modified_base 25: mod_base = OTHER; note = 2'-O-methylcytidine
  modified_base 26: mod_base = OTHER; note = 2'-O-methylguanosine
  modified_base 29: mod_base = OTHER; note = 2'-O-methyluridine
  modified_base 30: mod_base = OTHER; note = 2'-O-methyladenosine
  modified_base 44: mod_base = OTHER; note = 2'-O-methylcytidine
  modified_base 45: mod_base = OTHER; note = 2'-O-methylnebularine
  modified_base 49: mod_base = OTHER; note = 2'-O-methyluridine
  modified_base 50: mod_base = OTHER; note = 2'-O-methylguanosine
  modified_base 62: mod_base = OTHER; note = 2'-O-methyluridine
  modified_base 63: mod_base = OTHER; note = 2'-O-methyladenosine
  modified_base 67: mod_base = OTHER; note = 2'-O-methylcytidine
  modified_base 68: mod_base = OTHER; note = 2'-O-methyluridine
  modified_base 69: mod_base = OTHER; note = 2'-O-methylguanosine
  modified_base 72: mod_base = OTHER; note = 2'-O-methylcytidine
  modified_base 75: mod_base = OTHER; note = 2'-O-methyluridine
  modified_base 76: mod_base = OTHER; note = 2'-O-methylguanosine
  modified_base 79: mod_base = OTHER; note = 2'-O-methyluridine
  modified_base 82: mod_base = OTHER; note = 2'-O-methyluridine
  modified_base 83: mod_base = OTHER; note = 2'-O-methyladenosine
  modified_base 84: mod_base = OTHER; note = 2'-O-methylcytidine
  modified_base 117: mod_base = OTHER; note = 2'-O-methyluridine phosphorothioate
  modified_base 118: mod_base = OTHER; note = 2'-O-methylnebularine phosphorothioate
  modified_base 119: mod_base = OTHER; note = 2'-O-methylnebularine phosphorothioate
  modified_base 120: mod_base = OTHER; note = 2'-O-methylnebularine
gttctgtcttttggtcnggacaaccgtctagctataagtgctgcngggtgtgagaaactcctattgctggacgatgtctcttacgaggcattagcacaaccaacagcatagtcaaatnnn

SEQ ID NO: 89 - RNA, 120 nt, synthetic construct
  source 1..120: mol_type = other RNA; note = Description of Artificial Sequence: Synthetic polynucleotide
  modified_base 1: mod_base = OTHER; note = 2'-O-methylguanosine phosphorothioate
  modified_base 2: mod_base = OTHER; note = 2'-O-methyluridine phosphorothioate
  modified_base 3: mod_base = OTHER; note = 2'-O-methyluridine phosphorothioate
  modified_base 5: mod_base = OTHER; note = 2'-O-methyluridine
  modified_base 16: mod_base = OTHER; note = 2'-O-methylcytidine
  modified_base 21: mod_base = OTHER; note = 2'-O-methylcytidine
  modified_base 25: mod_base = OTHER; note = 2'-O-methylcytidine
  modified_base 26: mod_base = OTHER; note = 2'-O-methylguanosine
  modified_base 29: mod_base = OTHER; note = 2'-O-methyluridine
  modified_base 30: mod_base = OTHER; note = 2'-O-methyladenosine
  modified_base 44: mod_base = OTHER; note = 2'-O-methylcytidine
  modified_base 45: mod_base = OTHER; note = 2'-O-methyladenosine
  modified_base 49: mod_base = OTHER; note = 2'-O-methyluridine
  modified_base 50: mod_base = OTHER; note = 2'-O-methylguanosine
  modified_base 62: mod_base = OTHER; note = 2'-O-methyluridine
  modified_base 63: mod_base = OTHER; note = 2'-O-methyladenosine
  modified_base 67: mod_base = OTHER; note = 2'-O-methylcytidine
  modified_base 68: mod_base = OTHER; note = 2'-O-methyluridine
  modified_base 69: mod_base = OTHER; note = 2'-O-methylguanosine
  modified_base 72: mod_base = OTHER; note = 2'-O-methylcytidine
  modified_base 75: mod_base = OTHER; note = 2'-O-methyluridine
  modified_base 76: mod_base = OTHER; note = 2'-O-methylguanosine
  modified_base 79: mod_base = OTHER; note = 2'-O-methyluridine
  modified_base 82: mod_base = OTHER; note = 2'-O-methyluridine
  modified_base 83: mod_base = OTHER; note = 2'-O-methyladenosine
  modified_base 84: mod_base = OTHER; note = 2'-O-methylcytidine
  modified_base 117: mod_base = OTHER; note = 2'-O-methyluridine phosphorothioate
  modified_base 118: mod_base = OTHER; note = 2'-O-methylnebularine phosphorothioate
  modified_base 119: mod_base = OTHER; note = 2'-O-methylnebularine phosphorothioate
  modified_base 120: mod_base = OTHER; note = 2'-O-methylnebularine
gttctgtcttttggtcaggacaaccgtctagctataagtgctgcagggtgtgagaaactcctattgctggacgatgtctcttacgaggcattagcacaaccaacagcatagtcaaatnnn

SEQ ID NO: 90 - DNA, 23 bp, synthetic construct
  source 1..23: mol_type = other DNA; note = Description of Artificial Sequence: Synthetic oligonucleotide
aaccaacagcatagtcaaataaa

SEQ ID NO: 91 - DNA, 23 bp, synthetic construct
  source 1..23: mol_type = other DNA; note = Description of Artificial Sequence: Synthetic oligonucleotide
aggtagtccatggacattaattc

SEQ ID NO: 92 - DNA, 23 bp, synthetic construct
  source 1..23: mol_type = other DNA; note = Description of Artificial Sequence: Synthetic oligonucleotide
caaaaactcaacatatttgatca

SEQ ID NO: 93 - DNA, 23 bp, synthetic construct
  source 1..23: mol_type = other DNA; note = Description of Artificial Sequence: Synthetic oligonucleotide
tacttcaacaaaaagtgaaatat

SEQ ID NO: 94 - DNA, 23 bp, synthetic construct
  source 1..23: mol_type = other DNA; note = Description of Artificial Sequence: Synthetic oligonucleotide
agaagagcaactaactaacttaa

SEQ ID NO: 95 - DNA, 23 bp, synthetic construct
  source 1..23: mol_type = other DNA; note = Description of Artificial Sequence: Synthetic oligonucleotide
tggaggaaataactagaggaaca

SEQ ID NO: 96 - DNA, 23 bp, synthetic construct
  source 1..23: mol_type = other DNA; note = Description of Artificial Sequence: Synthetic oligonucleotide
aagaacccacagaaatttctcta

SEQ ID NO: 97 - DNA, 23 bp, synthetic construct
  source 1..23: mol_type = other DNA; note = Description of Artificial Sequence: Synthetic oligonucleotide
ctggcaatgtccccaatgcaatc

SEQ ID NO: 98 - DNA, 23 bp, synthetic construct
  source 1..23: mol_type = other DNA; note = Description of Artificial Sequence: Synthetic oligonucleotide
cattggggacattgccagtaatc

SEQ ID NO: 99 - DNA, 23 bp, synthetic construct
  source 1..23: mol_type = other DNA; note = Description of Artificial Sequence: Synthetic oligonucleotide
cccaagtaaaaagaatattcaat

SEQ ID NO: 100 - DNA, 23 bp, synthetic construct
  source 1..23: mol_type = other DNA; note = Description of Artificial Sequence: Synthetic oligonucleotide
aatataatgtttgttgtctttcc

SEQ ID NO: 101 - DNA, 23 bp, synthetic construct
  source 1..23: mol_type = other DNA; note = Description of Artificial Sequence: Synthetic oligonucleotide
gaagagcaactaactaacttaat

SEQ ID NO: 102 - protein, 1108 aa, Bacillus sp.
MATRSFILKIEPNEEVKKGLWKTHEVLNHGIAYYMNILKLIRQEAIYEHHEQDPKNPKKVSKAEIQAELWDFVLKMQKCNSFTHEVDKDEVFNILRELYEELVPSSVEKKGEANQLSNKFLYPLVDPNSQSGKGTASSGRKPRWYNLKIAGDPSWEEEKKKWEEDKKKDPLAKILGKLAEYGLIPLFIPYTDSNEPIVKEIKWMEKSRNQSVRRLDKDMFIQALERFLSWESWNLKVKEEYEKVEKEYKTLEERIKEDIQALKALEQYEKERQEQLLRDTLNTNEYRLSKRGLRGWREIIQKWLKMDENEPSEKYLEVFKDYQRKHPREAGDYSVYEFLSKKENHFIWRNHPEYPYLYATFCEIDKKKKDAKQQATFTLADPINHPLWVRFEERSGSNLNKYRILTEQLHTEKLKKKLTVQLDRLIYPTESGGWEEKGKVDIVLLPSRQFYNQIFLDIEEKGKHAFTYKDESIKFPLKGTLGGARVQFDRDHLRRYPHKVESGNVGRIYFNMTVNIEPTESPVSKSLKIHRDDFPKVVNFKPKELTEWIKDSKGKKLKSGIESLEIGLRVMSIDLGQRQAAAASIFEVVDQKPDIEGKLFFPIKGTELYAVHRASFNIKLPGETLVKSREVLRKAREDNLKLMNQKLNFLRNVLHFQQFEDITEREKRVTKWISRQENSDVPLVYQDELIQIRELMYKPYKDWVAFLKQLHKRLEVEIGKEVKHWRKSLSDGRKGLYGISLKNIDEIDRTRKFLLRWSLRPTEPGEVRRLEPGQRFAIDQLNHLNALKEDRLKKMANTIIMHALGYCYDVRKKKWQAKNPACQIILFEDLSNYNPYEERSRFENSKLMKWSRREIPRQVALQGEIYGLQVGEVGAQFSSRFHAKTGSPGIRCSVVTKEKLQDNRFFKNLQREGRLTLDKIAVLKEGDLYPDKGGEKFISLSKDRKCVTTHADINAAQNLQKRFWTRTHGFYKVYCKAYQVDGQTVYIPESKDQKQKIIEEFGEGYFILKDGVYEWVNAGKLKIKKGSSKQSSSELVDSDILKDSFDLASELKGEKLMLYRDPSGNVFPSDKWMAAGVFFGKLERILISKLTNQYSISTIEDDSSKQSM

SEQ ID NO: 103 - protein, 9 aa, unidentified
  source 1..9: note = Description of Unknown: PCSK9 cleavage site sequence
SSVFAQSIP

SEQ ID NO: 104 - DNA, 25377 bp, Homo sapiens
  source 1..25377: mol_type = unassigned DNA
gtccgatggggctctggtggcgtgatctgcgcgccccaggcgtcaagcacccacaccctagaaggtttccgcagcgacgtcgaggcgctcatggttgcaggcgggcgccgccgttcagttcagggtctgagcctggaggagtgagccaggcagtgagactggctcgggcgggccgggacgcgtcgttgcagcagcggctcccagctcccagccaggattccgcgcgccccttcacgcgccctgctcctgaacttcagctcctgcacagtcctccccaccgcaaggctcaaggcgccgccggcgtggaccgcgcacggcctctaggtctcctcgccaggacagcaacctctcccctggccctcatgggcaccgtcagctccaggcggtcctggtggccgctgccactgctgctgctgctgctgctgctcctgggtcccgcgggcgcccgtgcgcaggaggacgaggacggcgactacgaggagctggtgctagccttgcgttccgaggaggacggcctggccgaagcacccgagcacggaaccacagccaccttccaccgctgcgccaaggtgcgggtgtagggatgggaggccggggcgaacccgcagccgggacggtgcggtgctgtttcctctcgggcctcagtttccccccatgtaagagaggaagtggagtgcaggtcgccgagggctcttcgcttggcacgatcttggggactgcaggcaaggcggcgggggaggacgggtagtggggagcacggtggagagcggggacggccggctctttggggacttgctggggcgtgcggctgcgctattcagtgggaaggttcgcggggttgggagacccggaggccgaggaagggcgagcagagcactgccaggatatcctgcccagatttcccagtttctgcctcgccgcggcacaggtgggtgaaggagtgaatgcctggaacgtactgggaactgcaccaggcacagagaaagcgggcttgccattatagtgggttccgatttggtttggaaaacatgggcagcggagggtggagggcctggagagaaggccctacccgagacaggggcggggtgggaaggacggcagatgctgggagcacgaggcaatttctttatgacacagaactcatgctctagtattccatctgtttcagccgaagaaaagaaccagctgaaggggcaggggagaaggggcggaggtattctcgaggcccattggcgtcctttaggactcaggcagggaagggcccttggtgctctggagccggaggtggtgcgcctggtactgggaccccggagctgagcccggcgcctcagcccacctggctgtctgccgaccgtgtgcggggcgagtttgctcaacaactctgccagcttctggccctcaggctgtgggaagcttcttcccggggcgagaccactagctttttctaagtattaccagcccaggacttggctgaggttctgtgtcccccagcttggagtcagatgtggggttgaatcttggcttcctctcactagctgtggtgcttgacaagtcacttatccttgagcctccattgcctaatctttaaaagggaggtgacaatcgtccctacggctcagtggcagcagatggggagatgaagggaaagttctgttgaccatgagtgaacttacaatgcaagccccggggggatcacttgcagttttgtccctgtctgcagtgtgacctgttggtgacattgtctttgctccaaaccacagctcctggggcagaggggaaaattctgccactcacagctgcctgcccacgcttctgtctgagtgtgctgggtggcaggatggcaagtccttactcagctcagtatagccctcttccttgttccctgagcctttgactttctcgagggatgttgtggggttgtggccaggataagaaagggcatttcaagttaccactgctccaaaacaactgttctggaaatagtgagtaccccatcctgagaggtgagtaagcagaggctgtatgaccacctgaaccaagcccttgaggatgtttcttctctggtggaagtttggaacaggagcctcctcaagttcatttattcattcattcaatggttattttgtgggaatcgaatttagaatgaaaatattttttggcaagcagaaaataatttttagaccaatccttttcttttagtcatgagaaactgaggcccagagagaggaggtcaccccaggtgcattagaactgggtttccagaactgacactccactgcacagagtactctcccaattcattcaatttttatttagcggaaggcattttcagatgggtctttgaagcattagtaggagttcagcgatgatggtgtcatgagaattttattctaggattaggaggtaccatgaacaaagatacagagctgggaaaaccagaggtggaagataaggagcacatgtccacagttctttttcttttttttttgagatggagtttcgctcttgttgcccaggctggagtgcaatggtgcagtctcagctcactgcaacatctgtctcccgggttcaagtggttctcctgcctcagcctcccaagaagctgggattacaggtacctgccaccacgcccggctaatttttgtatttttagtagagaaggggtttcaccacgttggccaggctagtcgcaaactcctgacctcctcagtggatccgaggaggtgatcctcccgcctcagcctcccaaagtgctcgaattacaggtgtgagccaccacgcctggcctccacagttctttatccaccgtctgaaatgtaaaatgttacgaaaaccaaaagttttttttgtgatttatttgatggtagcacctgacgtgaactgacatgagattatttttaatttagttgtgtgaatatgcatattcatatattttgctgcatagattacagtatgcagctccagattcttccaagcagactctgattgcccattactgcctttctaaaatccaaacaagttctgaggttcaaaaccgttttggccctaaggctttgggtaaagggggtggactctgttctactctgactggagtccaagatgcatatatacagagatatgggtgatggggctgcaaggtaggttgaggtaggggccaaggaggagcatggagtttggacttgattcatgaggctgtggggagccagtgaaggttcttaagcaggtatgtctgcctgagagcagttggagcagacaagagctaaaaaccaaacaaatcaccatagatagtggctgctataatttgtttgtcccctccaaatctcatgtggaaatttggtcctcagtgttggaagtggggcctaatgggaggtgtttgggtcatgggggaggaacccctgtgaaaggcttggtgccgtccttgtgataatgagtaagttctcccgctatgatttcccttgaaggctgattattaaaaagagcttggcacctccctctcttctctcttgcttcttctcttgccatgtgattgatctctgcacatgtaggctccccttcaccttctgccatcagtgaaagcagcttaaggccctcaccagaagcagatgctggtgccatgcttcctggagagcttgcagaatcatgagctgaataaatcccttttccttgtaaattactcaccttcaggtattcctttatatagcaacacaaaaggactaagacagtggccttgacttttctctctctttaagaagtgttgcctttgctcacttagtcatcccttctgcctgcatttgtagagcatctggatgggagatttatataaccgtcactcttgactttcccagcaggcctatgtcataggtactgtggtctctacaatacagcagaggtatctgaggctccgagaggttgagtgacttgctcatggctgcacaaccagtaaatattggagctggaattcaggtccacggtttcctggctccaaagcccatgattttttccctcaatttattctgactggggcatgggggagggggtggcctttgggcagggccaccaggagcgaccaggcccgtagagagctgggtgcaggtacagaggaaaacctgttgtcgagtgtggcccgtagttcccatttttgcctgaatggcacatttgaaagtgttatataaccatgtgaataataatagttggcctatatgagttctttaatttgctttttggtccgcatttggtaacttctttatcatctactatactctgttgtgtctcttttgttgtaatttgtaagtaggggtgagataaagtacacctagggtttgctgggtttcttccatgtcatcatgttcctccttgcatggggccaggatccgtggaggttgcctggcacctacgtggtggtgctgaaggaggagacccacctctcgcagtcagagcgcactgcccgccgcctgcaggcccaggctgcccgccggggatacctcaccaagatcctgcatgtcttccatggccttcttcctggcttcctggtgaagatgagtggcgacctgctggagctggtgagccaccctttttgggaatggcacttcctgatagggctgggccactgcatatacactggggactgtgcttagtaggcccattgctgaaaatcagaaggggacagcaagtatgtattgagcacttatcgggtaccaagcacagtaactactggctttctgtatagaattccctttaagcctggccatgccccagtggtacgtctatcttcatttgaaagacgaggagactgaagttcagaggggaccacacagacagctaggggtagagcctggatcaaacccattggtctgcctgccagccattcttgtgccaatgcatctgctgcctacggaaacctgtagggacaaggccctgggatgttcagtggagcctgagtcattttataaaaaagcatgactctagggtccaaaattcctttgaagctgttgctatccagagtgaagtcccttctttaggacagggtggccctcctccctcctggatgtcacatcttcggtggaggggcagaaaggggactgggtattctcctcaccctggccctagtgcttcaaatcttaaaaaaacgtttttatttgtgcttctgcaccaccttctagcccacctcgtttcctggcctctaacttgatgagagcgtgtgtcattttcacactgattctccacatggcaggcggtgcttcttagcctcctgcagacagtgaggccccacggtcttgtccaaggtcacacagcgtgtaatgggcagggtcagagtctggagtctggacctgggtctcctagctgcactgcactgctgccccatgggttaatcagctcagcataccgtggctgaacagctacctcataccaaggcctgtggcgccatgacagggattgacagggtccctgccttggaaacccgtagtctaagtagaggagactgacaagtcaatgccttccatcagtctgctcaacacacgtttaccaagtgcctactgtgtgctgcagaggcgaagatgacacagctcaggcctttcccttgagcttacagttcaggaggagagactgaccagtgactgccagtacagttgactatgggacaatgtgctcagccttggggagagacgaagaaggtacccgtatagcaccagatgacaggcacgagccccacaggccagggcagctgctcagaggagagtaggccaagcagaaggcaaacagaaggctgcaggcatttgccatcgagagctggacttcaaactgggcatcataccagcctgggttcgagtcctgcccagccccttattggctgtctaaccctgagcaaatcccttcacctctctgagcctcattcctctatctgtaaaccagttataataattggaacattcatttaaggactaaatgaggtcgtgaagcattcagcagatgctaggtacggaaactcgctgaagtgggggcaggttaagaagcctctggggatacgaaggcatccagggactagttgtggcaggaggctgttaccacttaggtctgaagggtaaggagagggaatagctttccctctgcccagttggagccggtggcatggaggagaggctgcctgtggggaatcacccgagggttcaccgctgccatgcgcagggagtcaggaggtagggagggagtggggcagatgcacaccatttttttttttttttgagactctgttgcccagactggagtgcagtggtgccatatctgcacctctgcctcccgggttcaagctcactgcaacctctgcctcccgggttcaagcgattctcctgcctcagcctcccgagtagctgggactacaggtgtgtgccaccatgcctggctaatttttgtatttttaatagagatggggtttcaccatgttggccaggctggtctcgaactctcgacctcaggtgatcccccacctcggcctcccaaagtgctgggattacaggcgtgagtcaccgctcccagctgctgatgcactcttgtccttctaactcctgctagtgcctcccattggctgagcccaactggaagctttgcaagggagctggtgctgcagtttgcactgagcaggctggagaaggctggagaatagactaggggacaaaccgaattgccagtgctgttatgtcatgatttaggcatggagtccagggcctgagcttcactccatgtccatcctgcccagagccttggcacagcctggctcccagacaagatgtcaagttcagaatccttcctaaaaggaatcctctatgccagaccgtgttgcagggatatgggagtgctgggctcccagcctgatcaaggagcgagaaaactcaggctcctagtctgtcctccggggcactagcagggacaaggtgggaggctgctgggctgggatgtggggacaggtttgatcaggtaaggccaggctgtggctgtgtttgctgctgtccaaatggcttaagcagagtcccccggcctctctggcttctgcaggccttgaagttgccccatgtcgactacatcgaggaggactcctctgtctttgcccagagcatcccgtggaacctggagcggattacccctccacggtaccgggcggatgaataccagccccccggtaagacccccatctgtgccctgccccaccccatctgagctgaatccatttgctctgccctggcctggcctccctgctggtggtttccacttctcggggggctttgggactcagcacctccactgacccctttttttctgtcccatccccatcccctgcagcccccactgcctgccttcctgttgccccacaaatgcaaaagtcttgccttaaatgatcctcttttccttcttttctcttgttttccttttctcaccatttggaatggcccagcaggctgcacttaccttggaaggagggttcatctgatggtgactctacctagggcccccaggcctctataactcccagtgccctgcagactggaccagatcctttaatgggatagacacaaccctgtctgggatgcctctgcctaccttcctgttttgctgctccacctgcctccagctccgtttggcttcctggggctccctgcctgggccactttgtgtcttccctctaggcctttctttccactgttccctctgcctggtgtggcctggctatggaagggagggaggaggagcggccatggaaaacggtctgcattctagcagggacttgcaggtggcaattcagtcggggaagactctagatgcacctggcctgaggagagaatgaagggttctagttggactgtgttaagtttgaggtgcccatggtgtgaggtctggagctcagcgcagagatgatgcaatgtggtgggtccatgcaacatggtgccaggacgcagagcttggggtgaactcagctttcaccccttaccggttctcgtgggatcttgggaagccactttcttctatgagctttgtcgttcttgtctgtaaaatgggcacataaccctgtccctgtccttctcacaggttgctgtgagactccaatgagttgaaggatgtgcagatgcttttggaagtgaaaagttggggggctactgtgtgactttgcatacacccaaactgtgtgaccttgcatatgtctgagttgctgccattgcaacagatcagagctggtgggctgggtgtggagaaagggtttgtgtgggggacatcctctggcaagggtggcagcagcagaagtgaggggcctggtcggtcatgtgtgctgacccggcctgggcagcctgtggccagggagaggacagctcctctgtaggaagagcctgttcctttccaaccaggtgagacctcttcagtggagccctggagccccctgtactccacatcagtgcctcagggacctcccggagcaggctaatatcagagaccaagagggacactggcagaggatcacagagaccccagtccaggcagggactgagaagatcttgccccctaagttagtttcctagcactgctgtgacaaattaccaccccctcggttggaacaagttgattctctgcagtcctggaggccagaagcctgaatcagtgtcggcaggaccactttctcccggggggctccagggagaagcttctcttgcctcttccgtgtcccaacagcggcagcacaccaatcccagcctctgtcttcacacagccttctctgtgtctctctcctcttcattgtctcataaggacacttgtcattggatttagggcccactggatcctccaggatgatctcatgtggggaaccttaaccacatctgcaaggaccctttttccaaataaggtcacagccacaggttgtgggggttaggatgtgagtgtatctctttggcagccactgttccctcctctcccttgggccagaagcagacgtggggccctttcttccccataggatgcccatggattgccccccttcccgcttcccccgagtgtctgtgggaggtggcaggaatggcaggcaggggtgtggaaccccttctggagtcatatcaagggcttggctggaggaagtcctcctggagctgttgggctggcatggggcaggctggctgggcccagcagcagcttcttcattcatggggaggccacaagcatgggccctagagctggctgccgccctcaaacccagaccctgcactcttaactgtgtgaccttgcatacgtcactcaccctctctgatcttcaggttcctctgcaaaagggaggtaatgataaccctcactctggggggctgtttggagggttaaatcagttattgctgtagcatgcatttctctgtcaggtattgagtgaggtgctgtgattttagccctgcatttttcttttcttaccattcaataataacgttttgagcacccactgtgcgccaggcaccatattaggtgctggggatacaaatgtgaatgaaatgaatgtggtctcttcccccaacagtgtatccagaagattaatccattccttaaacaaatgctacttgacacagattagttctggataggctgagagctctgaaggagtgcaggcagctgcgagcctgtgtatccagcagaaggatcaggaaaggattcctggaggaagcgctgttctagccaagacctacgggggcattattaaccaggcaaaggggacggtgtccaagcagtggaatgaacgtggattgaagctgtgaggcaggagggagtgtggcctgtgcagaagggaccgaggctggtgagaccaggagggcctgggtggcctccaggtcagatgtgaaaggaagaacttggccacagtctgagcttctcaggcgtatggcagggctgcctggtgagagggaatgagctccctgctctggaggtatgcaagcaggactgggctctcacctgccagaggccacagagctttccagaggctggaagaggccactccaaggcctctttgcccctgagagtggtggctcttcttgaggccaccttgccacgctgtcacagggaactagcagcccctgcctcacccgggggtttggaagatagagggaggcctaggaagggccctgtgtctcatccgagctgggcccctttccagcctctcactggaaggaagcccaaggatgttcctgtgggggcttttaccaggcccacctgccctctgctggccatgcttgcagcctcctgaccctgtcccagcaggacagtgggctggtgtgagcgggcaggaaccgcctgcacttagaaggtgtggggctgcctccccgagcttccatctgccgctggggccacaccccaggcccagggatgggaccccacagtggtcacatcatcttgcagcagaacccaggtacagctcctggagcagatggtggtcccaagcacgggtgggaccagaaaggactctcacctgggctaactcagctgcagcctcagttccctcctcacacacgacgaggaacatggactggaagcctgcccagcaggccttctgctcgatgtgcgttgtgtggcttacgtccagggagggaagcagcctctgtgctgtcttctagataagcctgtattccccgggctgtctgccaatgtatccagttgtcccgtcagcctggaagctctgagggaaaaccttgggctgcttcctgagcacctgtatcccctgcagccagcccggggcctctgctaggagcagactgagcatggcttatgggcctggcaccatctggcctctgcccaccttgctggccttgtcttgtgtctgccccttcgacattccatagcccagctcaatatctagtggttcctctagggtggcgagcactgtttggtctccagatgtcttcaggtcggagctcacagcgctctcagccaccccttcccagtgtagcaccgggcacatggtagatgcctattgatgagtgaaagctcctaacacactcagagagcaaggactccgcctcatcccacagcctgggaggagaggcagactgccaaggacctgctcagcatgctacagaagaaaccaaagtgcccacgggactgatcagtggagcttcctgccgagactggaggccttagggcagggtagacagtgtgtgtgcaggctggggactcacagttcggactgtgcccagacctactagcatagtgggtgggtgggaggatgcgggactgggggccgaccttgcctgaaattcatgtgggatctcagagcagccactgaattgctctgtagggggctaaatagtggcccccacagatacacacacccagacagagcctgtgagccagaccttatttggagaaaaggtctttgtagatgtaattaagcatctcaagatggcatcatctggattatgcggtgggctgtaagtcctgtgatgtgtctttatgagagaaaggcagagggagatttgacacacacaggaggggccacgtggagacagaggtggagattggagaaatgtggccacaagccagggaacaccagcagccaccagaagccggaagacgtgaggcagggttcttcccagagccttcgctgctgagtctgggaatttgtgaccgaagccataagaagtgggtacacgccctgagcctcccacacttgctcacctgtcctgagatgagaatctctactctgcagcatatttggaggatcactgcgggggccacagaggtgctgttcagatggcacttcagaagactcaggagaccctggggcaggagcagtttgactgacagcccagagggctgccctctgattccacctgaggccctgcttttcctggctgcaggggttccagggccaggccatttccgctggcgcaggactctgctagcagcaacctgcctgaagtcttcctttggcctggctgagagtttctgagacctgcgctggagcggaggtgcttccttccttgcttcctttcttcctctctcccttctccatccagcaggctggacctgcctggcatctgtgagctctccctactttctcctataccctaacctttgtcctgcatgggcgactcccccagtgagtctcttgcagcttttaccccagtgcctgcttcttggagaatccaaactgatccagttagggatgataaagtgtagggtaggcgctcggtgactgttttctctgaggttgtgactcgtgtgaggcagaagcagtccccgtgagccctcctggtatcttgtggagtggagaacgcttggacctggagccaggaggcccagacatacatcctgtccgagctgcagcttcctgtctctaaaatgagccggccagcgcaggtggccagacatcactgttattctcctttgagtctttaaatcttgttgtctttcttgcagactcggtgagctgtgaaaggctataataggggctttattttacactttgatactattttttgaacattcatattattgttagatattgatattcatatgaaggagcaggatgacttgggtccttcttggcagtagcattgccagctgatggccttggacagttacctgccctctctaggcctccctttccttgtctatgaaatacattatagaataggatgtagtgtgtgaggattttttggaggttaaacgagtgaatatatttaaggcgctttcaccagtgcctgggatgtgctctgtagtttctgtgtgttaactataaggttgactttatgctcattccctcctctcccacaaatgtcgccttggaaagacggaggcagcctggtggaggtgtatctcctagacaccagcatacagagtgaccaccgggaaatcgagggcagggtcatggtcaccgacttcgagaatgtgcccgaggaggacgggacccgcttccacagacaggtaagcacggccgtctgatgggagggctgcctctgcccatatccccatcctggaggtgggtggggactgccaccccagagcgttgcagctgtactcctgggttgcaccccccccagctgtcactgtcccctccctgccatcagttgtgggaagggcgttcatccatccagccacctgctgatttgttatagggtggagggggggtctttctcatgtggtccttgtgttcgtcgagcaggccagcaagtgtgacagtcatggcacccacctggcaggggtggtcagcggccgggatgccggcgtggccaagggtgccagcatgcgcagcctgcgcgtgctcaactgccaagggaagggcacggttagcggcaccctcataggtaagtgatggccccagacgctggtctctctccatctggacctggcctgggaggtggcttgggctgggcccagggagagctaatgtctcctaaccaagaatgctgtggcagcctctgccgcagagccagagaaccagagtgccaaggctggcagggttcccagtggccacgagtgcagatgaagaaacccaggccccaagagggtcatgcaggtagcccagggagttcagccttgaccctgggtcaatgacctttccacagttccacactgctccccttttaaaatccggtgatgtctttatgtcttttgttatgttatcttcaatgtggagggactcgaggtgatctaagcaaactttttctatcttctgcttgcatacctctgagaccaggggactcactcacttgcatgactgggccctgcaggtcacactggccaggcagatgtggtggaggaactggcagaggactttttctagactgtgactacatttagtccacccagcggcccccctatgaagtccagttgagaactaggactctgggggccggtggacagagaagagggagggttctctcccttactgacttccttctgtggccagacattgagcaaggcctctgtacagcatgtcctggggctggccttgccgtagctgctaaatagttgacgaaaccagtccagagaggggaggtgactgccagggtcgcacagctcaagctggggaactcgctgggaaaactgtcagctctgggcagcagcttgacttccactgtaagccccagcccccagggtcaaacactggctctggtgctggcagaggcagcccactagcctgtttcaaaggctgagaaggcccaggagtctgccctgtgctccaccagttctgcccgagactttcctacagagtacaggttttgatgttcagttttaaaggcaagaatcaataaccttctgccccatcaggtgaccccttgtgcctgtcccacccctttattgactgacctcggctcagtcaggtcagttcctgaaggtcagtgtgtggaggggaggctgttctttcccagaaaggccttccccaggcctggtgctctggcctctggaggacttcctggagaagtcccttctttggggtcccagtcagtgtatgggaagcccttattgcatgacctggcacggggcaggggctcaacagtcactattgccttccttgccactgccatttcctcctctgtaagcaggtgattgtgtgtccagtctgagcacagagataagcacacagcaggtgcttaataactagcagctgtaggctgggcgcggtggctcatgcctgtaatcccagcactttgggaggccgaggtgggcagatcacctgaggtcaggagttcgagaccagcctgttcaacatggtgaaaccccgtctctactaaaaatacaaaaattagccaggcatggtggtgggtgtctgtatcccagctacttgggaggctaaggcaggagaatcgcttgaacccaggaggtggaggttgcagtgagctgagatcgtgccactgcaatccagcctgagtgatagagcgagattccatctcaaaaataaataagtaaataactagcagctgtaaatgtggctgttgttcttcacctccacactcagtgccactccactccctccctccgtggtgtgaggggcctcactagctgtctcctaggaggagcatggctgtgagattccagctccatccttggccacggctcctggagacatcttagaggccaggatccagaaggctcccacacctcatttgacaggggagaagctgtcagttccaggtccccttgcacatcagggccagagctgcgttaggcctccagtctccaggccactgggccagagctcacaggctggcagagggttagaactgttactggtggctgggtgcagtggctcacgcctgtaatcttagcactttgggagggcaaggcgggaggatcatgaggtcaggacatcgagaccatccttgctaacacggtgaagccccgtctctactaaaactacaaaaaattagccgggcgtggtggcaggcgcctgtagtcccagctactcaggaggctgaggcaggagaatggcgtgaacccgggaggcggagcttgcagtgagccgagattgcgccactgcactccagcctgggcaatagagcgagactccgtctggaaagaaaaaaaaaaaaaagagctgttactgttgacagtagcatgaggtagaccatggcctgcaccaaaatgggggagtggagtgccactgaggccagaaggaaccacaccctcaagggtggggagttatggtatggggggtcctaggcatggagtcttttaattctttagacaatcctgggagcaactgtccctgtttcacagagggcggggccacacagctggtgagtgggcagccaagactctgttcaagtttgtgtgggtccaacacttgcggccacggtggaggggcatctgagccaggcctcagagagtggcgggggaagttgggtggggaagtgtgcccttctcattcctctgaggctcatcctcttggtgcctctctttcatggaaagggataataaggttattgtgaggatcccctgagttcgtatattcagacgcttagacagagccaggcacagagaagggcccggggttggctagtttgattgctggtgtaattgctaatatcttccagtttgtattggtcaaggttctgcagagaagcagaaccagtaggatgtatatattaagagtttcaagctcatgtgaccgtgcgggctggcaagtctgaaatccgcagggcaggccaggcaggctggcaattcctgcagaatttgatgttgcaatactgagtcctaaggcagtcctggggcagaattccttcttccctgggaggcctcagtctgttctcttaaggccttcaactgattaaatgaggcctgcccaagttatagagagtaacctgccttactccgtcttctgatttaaatgttagtcacatctaaaaaatattttcgcagcagcatttccactggcttttgaccaaacatcaggccacaaagttgatccccaaaattaaccatcactctgtgcctgtaagggaggggctgggaaaggggagcaggtctccccaaggggtgaccttggctttgttcctcccaggcctggagtttattcggaaaagccagctggtccagcctgtggggccactggtggtgctgctgcccctggcgggtgggtacagccgcgtcctcaacgccgcctgccagcgcctggcgagggctggggtcgtgctggtcaccgctgccggcaacttccgggacgatgcctgcctctactccccagcctcagctcccgaggtaggtgctggggctgctgccccaaggcgcgggtagggggcggagggcggagggcggagggagggcgggcgggcaggcgggcttcttgtggcacgtgggcttcttgtggcacgttcctggaggccgaacccttctggctttggaaggagtcgtcagagacccccgccatgcgggaggctggggaggaaggggctcgaaacctccatcatcgcagagtctgaatagcagtggccccgccatgcgcccacgtagcggcgcctacgtagccacgcccccacaccccgtcctggccactctccctcctgaaggtcttctggtacccgccccctccccatctccatccccaggccctgcgtcctctgcccaatactctttgggcctccctgttgtccagctctctccgcggctccatgactgacaacttgagcaaggctaatgtgaatgggagcggttgagggctcagacctctcacccgaggaacatccacagagtgtgccgcatgcccggtgcagtgtggctgcggggacacagacacggagcctcggccctgaggagctggggggcagtgaccgtccctcctctgacccaccactcctccagtgtcaggacactgcgggtatctaggggaaggaatcttgttccacttcaagtctggaacttcaagtctgtgtgtgtgcgtgcgcgcgcgcgcgttgggggtgggggttgcagagcagatgcgtacctgacagcggtaacctaggtcccccctggcctatcaaggcttccctggcggccgaatttaaaggcatcaagcaaacaaagcccaacacatctctgccttgtcctctcagtttccccccgtggcacttagaaccacttgatacaccgaatagtttcctatctcccccactaggatgtaaactccacaggggcattgggaatgctgcctggctatggtagggacagaggggagcaccagggcggggcaggggtgccagagttctgcctgggcagtcagattttccttaggaggggacatttgagtgggacccaaacaggtgtatagcagttgtccagcccagctggcaaggcctgagtctgcctctgcaacccctctcttgggctcctttctctgccacccacctcctcacctttccaggtcatcacagttggggccaccaatgcccaagaccagccggtgaccctggggactttggggaccaactttggccgctgtgtggacctctttgccccaggggaggacatcattggtgcctccagcgactgcagcacctgctttgtgtcacagagtgggacatcacaggctgctgcccacgtggctggtaagtcaccaccccactgcctcggccaccgtgatgctaacagcccctttggcagtcagggtctgtgccgggacctccagtgccaggctctgtgcagggggaccagagatgaagtaggcctgatggtgccttcaaggacactcagtctgatgagggaggcgagtgcacagaggaaacacgaggtcagggctgtattagagggagcccagaggaggcacctgcccagcccgagggtcagagaaggcatcttggaggagggacatttgatcgggagcttgatggatgaataggagttcacctggccgataagacagcaactaccaaggcttagaggtgtgagaggaggctgtcttacctcactgagtaaggactgcaggcggcttaccttcgagaagagagcttagtgtctgtgtgcacgtgtgtttgtgtgtatgtgtgtgcgtgtgtgcactggcaggagtcccctgctggggcaggagggccgggccatcaccatctttcaccattcacccctgcaccaggcattgcagccatgatgctgtctgccgagccggagctcaccctggccgagttgaggcagagactgatccacttctctgccaaagatgtcatcaatgaggcctggttccctgaggaccagcgggtactgacccccaacctggtggccgccctgccccccagcacccatggggcaggtaagcaggatggcagggtgggcaagtccaggctggggcttgggaggtctgtgtgaccttgacagtctctcccttctcccttgtctgtgtaaggaggatgacgccaccttaaataggattaaatgagaatggggctctgaaagggctgtgcaatattttcataacgtgtttttatagagacagttgagtatgttctttaagccctcctctctcctaccatgaactaaagatttctgtggaggtcccctcactcccagcaccccctcctcatcccaggccctttttgcaggttggcagctgttttgcaggactgtatggtcagcacactcggggcctacacggatggccacagccgtcgcccgctgcgccccagatgaggagctgctgagctgctccagtttctccaggagtgggaagcggcggggcgagcgcatggaggtgactgtacccctccttcgtgtgtgtgtgtgtgtgtgtgtgtgtgtgtgtgtgtgtgtgtgtgtgtgtgtcagtgctgggccctcagggacccccagcaagcccctccatcctccagactccagctcttctgtaagcttacagggctggccagaccaggagtggggcactcctcacttcacgcggctgggggctgctggagagagccacagcgggaagggtttcctagaggctgcaggacagtgctggatggattttcaatgctcacctgggtgtgagcgtgcggcagggccgcgtgagggtcagcgatctgctactctggactcagccatctctaggcccctctcactcaggtgctccatggttctgggagctgagaaatctcaaaccagcaaaaaagtggaattgatgttgatgctacaggatagtgcacagatgccatctggttgcagcattttggtggaagggcagtgcccagctaggagagtgaggaggggcaggcatttctggcttgaggagatggggtcttaatgctcgtgtgagaggcagagtgggtggagtggagctggctggatccttgctttggcctcctggatttctctctatctccattttgaaaccactctgtgtttggaagaacttttgagtattcagagctgcccactggcagaacagtcttccttgggcaggagtgagctccttgtccccagaaggctgggtctggctggcccctggcagggacactgatgagggtgcttgagttgatcctgtctagtccctttctgtgttttcaaagcccattctaaagcagattcccatttccgtctttgactctaaggcccaagggggcaagctggtctgccgggcccacaacgcttttgggggtgagggtgtctacgccattgccaggtgctgcctgctaccccaggccaactgcagcgtccacacagctccaccagctgaggccagcatggggacccgtgtccactgccaccaacagggccacgtcctcacaggtaggaggctgggcttgccctggggtgaggaggggtctctttctccttatgcacccactgcccgcgaggcttggtcctcacaagtgtgatccatgagactcaagcctgacttgcagttccatactctggttctgccacttccatgccctttgagcctgggcaggtgaccttacttctcctcatctcagcttcctcctccataagagggaaaaaggtattacctgcctcattgtgttgcaaggagatgggcagcatctagggcactggcctggagtatcgcaggtgctttgcctaaggtggtgcagtccaggagaggcagctccagagagaggcccccggctggggctgaaaggagggcagacctcggtttgaatttcaccctgccgctctatagctgtgtgacttgggcaaattacttaacatctctgtatgaggaaatgatgagtgctaagcacttagcttagtgccgggacaatataaattctagctatcgttactattgttttcatcacccgttgctttaaaatccagcctctggtataggcaactattgacgggctaccctgtgtcgaaaacatgcccaggcaggtagcaggaagtcacagatggggacctcttggggcatcaagggatggtgccctgaggctgagctgttctggttgggtggagcatgagaggtctgggaagacagtgggactccagcctggaataagaggctcagagttgattctcgtctgagcacgtccaggggaaccactgagggtttgggaacaggagagtgagggtgagaacctggttctgggcacagcaggctggcatgtaggatggatgttcaggaaagatgagcatagtcaggtggctggtgcccttgtccaggggagaggctccgtcaggttcaggggtcctggcttggagggaagtccgccatgctctaatcacgctcccctttggaagtgctcagccgatgagctcacaggcacatgtcagtttgaagtcatggaatctgactccatgaagcgcacctcaaagagcaccattttgcagctaagggaactgcaggctggacatgctgagtggctgccccgagcccttgcagctaggacatagagaatgctagtaaccacaaccctaccatgttcagagcacatgccaggctccatgctggggcttcgcacgtgtcatcttcacagtgtccctgtgagtaggtgtggtttctctttccatcttacaaatgagtaaacagagcctcagtgtagctaagtaaccactattttaggtttcttagccaatgggtgtgtctgactcctaagcccatggagggcattctgaggtggttcagacagaccccggcttacccttgaacttctgcctgctggctgcatagggaggggctggggggagtttgagcatctcaggccatagagcccctgcctcactgtctccatctctgggtggaaagatggtgttttccctgagaaactaaggctcagagaggttgaatggctctcccaaggtcacacagctggtcagctgcagagttgagaacacaggagtcctggtgctcaggccagcatctctttttttctttgagttgtttctaggtttcctagctcttgcctcagaccttaaagagagagggtctgatggggatgggcactggagacggagcatcccagcatttcacatctgagctggctttcctctgccccaggctgcagctcccactgggaggtggaggaccttggcacccacaagccgcctgtgctgaggccacgaggtcagcccaaccagtgcgtgggccacagggaggccagcatccacgcttcctgctgccatgccccaggtctggaatgcaaagtcaaggagcatggaatcccggcccctcaggagcaggtgaagaggcccgtgaggccgggtgggtggggtgctgcgtgtctctcctgcacagcttttctgtgtcagtttgtgccaccaccataccgccatgcatcagggtggcggtttgccaggtagatgctgtgggcagcttccgccattgtgtggacagcatgtatatgtgtctctgtgtggctgggtctgtttttgcttttgtccagatcagtaaggtttgctacctgggtaccccactccacttggagtagaatgtgcataaatatggcataaagaaatgcaatatgcatgcatttattgattgatctatttttttctgagatggggtcttgctgtgttgcccaggctggtctcaaattcctgggctcaagcaatcctctggtctcagcctccccaagtgttgggattataggcatgagccgctgcacctggcctctctgatctatttaacaaacctgctgggagggtctcagggtcaggagcagcactgggctctgaggacacagagctcactcagccgtgacccagagggggtgcctgagctgcatgctgaaggttgttagcatgaccagcaaggcaagaaaaggccctgccgagattagcaaggcatgtgccaagccctggaatgtgacagccgggccttctagaaacctgagtgtataactctccttaaaagccagtaggagctcctcaaaaggcagccctaaggagtccactcttaaatgaactcagagtcagttttaaaatgcaagtctgtgttgattctggtctggatggtgcattcctcgagagcaaaagacagtcttggtcttggatccacttgccctgggtacactgagggctgctaggttccaggtgctcttcctggcactggggagggatacaggcccaagagacatgctgttctccctcctggagcatctattttagtggaggaagacagaaaacaaaccattaatatagagtactgaaaagatgcgatggagaaaactatagcaaggaagggaatggggtgggagagaggtcaggagaggtctcgctgacaaggtggacgaaacaggccatgaggcagagaacatgttccaggcaaagcaaaggcccccaggtggggatgtgcagggagtaccaggaaaccagagaggtgggaatagttatgagatggggggtgcctcagaggggacagggccaagtcaggtgagacctgagggtcacagtcagcagtgagctggggccatgcaggggtctggcctcagaggagtgtggtctggcctggatctgaacctctcactgtggcctagctgctgagctgagaagagatgacaaggaccttgggcagaagcagggagactggagggaggcggtggagggtccaggcgttggggcggggctcaggctggagtctgaagggagcctgcaggcctggtgggtggatgtgggtgggagagggggaggatggcaccaaggctcgggcccctggacagatggagttgccattaagtgggatggggcaggctatggggccatcagtttcagagggatgagtttggcactggcatggtaggcatctgtctatctccacggccctcaaaccaggcatgaagcaggagctcacgtgtttggtcagccatggtgcagaaccgcctgggtgggaggtgcggggtgggagatacacggttgtgtcccaaatgggctctgagccagcgagggccgtctgcactttggcctcacagaaggatgtcggagggagaaatgaagtgtgggtgggggtcccgggccacgctagacatgtgctttcttttcctcgggctctggcaggtgaccgtggcctgcgaggagggctggaccctgactggctgcagtgccctccctgggacctcccacgtcctgggggcctacgccgtagacaacacgtgtgtagtcaggagccgggacgtcagcactacaggcagcaccagcgaaggggccgtgacagccgttgccatctgctgccggagccggcacctggcgcaggcctcccaggagctccagtgacagccccatcccaggatgggtgtctggggagggtcaagggctggggctgagctttaaaatggttccgacttgtccctctctcagccctccatggcctggcacgaggggatggggatgcttccgcctttccggggctgctggcctggcccttgagtggggcagcctccttgcctggaactcactcactctgggtgcctcctccccaggtggaggtgccaggaagctccctccctcactgtggggcatttcaccattcaaacaggtcgagctgtgctcgggtgctgccagctgctcccaatgtgccgatgtccgtgggcagaatgacttttattgagctcttgttccgtgccaggcattcaatcctcaggtctccaccaaggaggcaggattcttcccatggataggggagggggcggtaggggctgcagggacaaacatcgttggggggtgagtgtgaaaggtgctgatggccctcatctccagctaactgtggagaagcccctgggggctccctgattaatggaggcttagctttctggatggcatctagccagaggctggagacaggtgcgcccctggtggtcacaggctgtgccttggtttcctgagccacctttactctgctctatgccaggctgtgctagcaacacccaaaggtggcctgcggggagccatcacctaggactgactcggcagtgtgcagtggtgcatgcactgtctcagccaacccgctccactacccggcagggtacacattcgcacccctacttcacagaggaagaaacctggaaccagagggggcgtgcctgccaagctcacacagcaggaactgagccagaaacgcagattgggctggctctgaagccaagcctcttcttacttcacccggctgggctcctcatttttacgggtaacagtgaggctgggaaggggaacacagaccaggaagctcggtgagtgatggcagaacgatgcctgcaggcatggaactttttccgttatcacccaggcctgattcactggcctggcggagatgcttctaaggcatggtcgggggagagggccaacaactgtccctccttgagcaccagccccacccaagcaagcagacatttatcttttgggtctgtcctctctgttgcctttttacagccaacttttctagacctgttttgcttttgtaacttgaagatatttattctgggttttgtagcatttttattaatatggtgactttttaaaataaaaacaaacaaacgttgtcctaac

SEQ ID NO: 105 - protein, 692 aa, Homo sapiens
MGTVSSRRSWWPLPLLLLLLLLLGPAGARAQEDEDGDYEELVLALRSEEDGLAEAPEHGTTATFHRCAKDPWRLPGTYVVVLKEETHLSQSERTARRLQAQAARRGYLTKILHVFHGLLPGFLVKMSGDLLELALKLPHVDYIEEDSSVFAQSIPWNLERITPPRYRADEYQPPDGGSLVEVYLLDTSIQSDHREIEGRVMVTDFENVPEEDGTRFHRQASKCDSHGTHLAGVVSGRDAGVAKGASMRSLRVLNCQGKGTVSGTLIGLEFIRKSQLVQPVGPLVVLLPLAGGYSRVLNAACQRLARAGVVLVTAAGNFRDDACLYSPASAPEVITVGATNAQDQPVTLGTLGTNFGRCVDLFAPGEDIIGASSDCSTCFVSQSGTSQAAAHVAGIAAMMLSAEPELTLAELRQRLIHFSAKDVINEAWFPEDQRVLTPNLVAALPPSTHGAGWQLFCRTVWSAHSGPTRMATAVARCAPDEELLSCSSFSRSGKRRGERMEAQGGKLVCRAHNAFGGEGVYAIARCCLLPQANCSVHTAPPAEASMGTRVHCHQQGHVLTGCSSHWEVEDLGTHKPPVLRPRGQPNQCVGHREASIHASCCHAPGLECKVKEHGIPAPQEQVTVACEEGWTLTGCSALPGTSHVLGAYAVDNTCVVRSRDVSTTGSTSEGAVTAVAICCRSRHLAQASQELQ

SEQ ID NO: 106 - DNA, 3166 bp, Homo sapiens
  source 1..3166: mol_type = unassigned DNA
ctgctcagttcatccctagaggcagctgctccaggtaatgccctctggggaggggaaagaggaggggaggaggatgaagaggggcaagaggagctccctgcccagcccagccagcaagcctggagaagcacttgctagagctaaggaagcctcggagctggacgggtgccccccacccctcatcataacctgaagaacatggaggcccgggaggggtgtcacttgcccaaagctacacagggggtggggctggaagtggctccaagtgcaggttcccccctcattcttcaggcttagggctggaggaagccttagacagcccagtcctaccccagacagggaaactgaggcctggagagggccagaaatcacccaaagacacacagcatgttggctggactggacggagatcagtccagaccgcaggtgccttgatgttcagtctggtgggttttctgctccatcccacccacctccctttgggcctcgatccctcgcccctcaccagtcccccttctgagagcccgtattagcagggagccggcccctactccttctggcagacccagctaaggttctaccttaggggccacgccacctccccagggaggggtccagaggcatggggacctggggtgcccctcacaggacacttccttgcaggaacagaggtgccatgcagccccgggtactccttgttgttgccctcctggcgctcctggcctctgcccgtaagcacttggtgggactgggctgggggcagggtggaggcaacttggggatcccagtcccaatgggtggtcaagcaggagcccagggctcgtccagaggccgatccaccccactcagccctgctctttcctcaggagcttcagaggccgaggatgcctcccttctcagcttcatgcagggttacatgaagcacgccaccaagaccgccaaggatgcactgagcagcgtgcaggagtcccaggtggcccagcaggccaggtacacccgctggcctccctccccatcccccctgccagctgcctccattcccacccgcccctgccctggtgagatcccaacaatggaatggaggtgctccagcctcccctgggcctgtgcctcttcagcctcctctttcctcacagggcctttgtcaggctgctgcgggagagatgacagagttgagactgcattcctcccaggtccctcctttctccccggagcagtcctagggcgtgccgttttagccctcatttccattttcctttcctttccctttctttctctttctatttctttctttctttctttctttctttctttctttctttctttctttctttctttctttctttctttcctttctttctttcctttctttctttcctttctttctttctttcctttctttctctttctttctttctttcctttttctttctttccctctcttcctttctctctttctttcttcttcttttttttttaatggagtctccctctgtcacctaggctggagtgcagtggtgccatctcggctcactgcaacctccgtctcccgggttcaacccattctcctgcctcagcctcccaagtagctgggattacaggcacgcgccaccacacccagctaatttttgtatttttagcagagatggggtttcaccatgttggccaggttggtcttgaattcctgacctcaggggatcctcctgcctcggcctcccaaagtgctgggattacaggcatgagccactgcgcctggccccattttccttttctgaaggtctggctagagcagtggtcctcagcctttttggcaccagggaccagttttgtggtggacaatttttccatgggccagcggggatggttttgggatgaagctgttccacctcagatcatcaggcattagattctcataaggagccctccacctagatccctggcatgtgcagttcacaatagggttcacactcctatgagaatgtaaggccacttgatctgacaggaggcggagctcaggcggtattgctcactcacccaccactcacttcgtgctgtgcagcccggctcctaacagtccatggaccagtacctatctatgacttgggggttggggacccctgggctaggggtttgccttgggaggccccacctgacccaattcaagcccgtgagtgcttctgctttgttctaagacctggggccagtgtgagcagaagtgtgtccttcctctcccatcctgcccctgcccatcagtactctcctctcccctactcccttctccacctcaccctgactggcattagctggcatagcagaggtgttcataaacattcttagtccccagaaccggctttggggtaggtgttattttctcactttgcagatgagaaaattgaggctcagagcgattaggtgacctgccccagatcacacaactaatcaatcctccaatgactttccaaatgagaggctgcctccctctgtcctaccctgctcagagccaccaggttgtgcaactccaggcggtgctgtttgcacagaaaacaatgacagccttgacctttcacatctccccaccctgtcactttgtgcctcaggcccaggggcataaacatctgaggtgacctggagatggcagggtttgacttgtgctggggttcctgcaaggatatctcttctcccagggtggcagctgtgggggattcctgcctgaggtctcagggctgtcgtccagtgaagttgagagggtggtgtggtcctgactggtgtcgtccagtggggacatgggtgtgggtcccatggttgcctacagaggagttctcatgccctgctctgttgcttcccctgactgatttaggggctgggtgaccgatggcttcagttccctgaaagactactggagcaccgttaaggacaagttctctgagttctgggatttggaccctgaggtcagaccaacttcagccgtggctgcctgagacctcaataccccaagtccacctgcctatccatcctgcgagctccttgggtcctgcaatctccagggctgcccctgtaggttgcttaaaagggacagtattctcagtgctctcctaccccacctcatgcctggcccccctccaggcatgctggcctcccaataaagctggacaagaagctgctatga

SEQ ID NO: 107 - protein, 99 aa, Homo sapiens
MQPRVLLVVALLALLASARASEAEDASLLSFMQGYMKHATKTAKDALSSVQESQVAQQARGWVTDGFSSLKDYWSTVKDKFSEFWDLDPEVRPTSAVAA

SEQ ID NO: 108 - DNA, 14994 bp, Homo sapiens
  source 1..14994: mol_type = unassigned DNA
aatgacaaactgaaaaaatctattgtttgttatatatataacaaagaattagtatccacaatatgtaaataattcctaaaattagtcagaaagagacaaacttaaaaagagggtaacaaggaggggagcaaattatgtacataaccagatgattcgcaaagacggcaacagagatggccagcaaaacaaactagatatatacttgtctattagatttatcaacattttttgcctttttcattaaaagcatttgtaaaaggatataggaaaagaggaactctcatatactcctggcagggatgtaaattggtacaacccttttgaaggacaatctgacaaaagcaatcgtaagttacaagtcaacatctatgaatgtatatgaaaatatttatatacatacatcaccaccataaaagcattttctatacatactgtttataattagaaaattggaaacaaatgattaaaagggggctgattaaattaaggttcatctatataacaggattatgcagctattaaaaaggacgtggtaactctatagacattcataggaaaataaattttaaaatactaagatcctgaatgatatatatatcatgagctattatacataacaagatcccacttgtgttataaaaaattatgtttagtcattcaaagggtctggtatgatagacccaaaatgttaatagagtcgagatttttattttttataggtttttgaaatacctgaattttcacaataagtactttgcacattaaaaatcttagctgggcatggtggctcacgcttgtaatcccagcactctgggaggccaaggtaggcagatcacctgaggtcaggagttcgagaccagtctggccaacatggtgaaaccccgtctctactaaaaatacaaaaattagccaggcttggttgggggtgcctgtaattccagatactcgggaagctgagacaggagaatcgcttgaacccaggagggggaagttgcagtgagctgagatcacgacgctgcactccagcctgggcaacaaagagcaaaactccgtctcaaaaataaataaagaaaaaatctttacatgtccaaagatacggctgttcaactaaaaaatatatatgtataaaacttaacatgttaatagtgaacacacaaaacagtaagatagataaaattattccttcaaagctcacttaacctctggatctacactgtccaaaaagacggtctaatgagacaattgagcacttgataggtgagtggttctaactgagatatgttctcagtataaaacatacaataggatcttcctatacaacattaattaaaaaacaaactattgtagttaaaaaggaaaaaattagagatactatgtaaaaaagagccaaaataccttgtattttatttgaaagacatatctccataagattacacaacctcgtgtaggataaaggactttgctttgcttggaatttaaacaatttaggctcttaaatgtcctaaaattctctgtagctaagaaatttttatattggttcctaggaactaggaatccttaaattaggccctacatttgcttacaagtttattttccttggcataaaattttttagtttttacattactggttatatttgatcagggttctatttaaataggcacaagttcaagcaaagatcagattctgcttttagcagtgtgtactcagacaggaagtattaaaaggcaggcagaaaatcctttataaaattactactttcaatgcattttcccacgttgaaatgcttctgcagtttataattaggcaaattactttaattataatcaataatgctgttcaaattactataagaattatacagatatttataccaagagacaatatactagaaaccaagactacgtgaccattacctctactctgtcagtgttatttgtgagaaattgcacaaattttgcaaaaagtgttagtatcctactacagtaggatataatatagaaggaaataatttcataaagcctgtctttggtactagtgctcagttactttcattaactaaaaaaggggctactcttcaaattcccttctctaaaaagaatgtactatatcaaaagggggtaaacactactacgtatacattctgcacttagaaatccctatatgttgattttatcattctcttattcaataaatattgtttctacaatgtgtaaggcattactgtactaaagcattataaggaatataagttaaaaacacatacaaatcttgccaatcaacagcttatagtgtaataggggagagaagctggcccatctatattctccctcaactagcaagtggatgaaatatcagggtcaatagttataagccacaaaagctgacagcttaattaagagaagttttgaaatatgtatttcatgaccaataattacaactgtaacttttctatttaaagaaggagaaaatttgaatttcttctctagctcaacatacacttctataattccattacatgaaccagagtaaagggtaagatggaaatgaagaatattttcttacccttttgtggttctatattggacacttaaaaatcatacacaacctaatcaaaagatgtaattctttaaaaaggtacgagaccaaaattcagaaaatctagactataacaaaatttctcaatttacattatcttaatatgcaattaattttcaccagtaaaatactatagtatgggtacaaatgcattgattagttctaattacaaaaatggctaatatataatactgtgtagtgtttatgatacatcagataatgttctaagtgctctgaaaatataaacttttaatcttttatacgaccctataaaataggtgttattctcactggagagatgagaaaacaggggttcagagatgtgaagtaatttgaccaaaggtcacaaagctgaagaatatgaaatccgggattctgattcaggcagtcttattccagaatcatgctcttaaccactatggaatactgcctctactgtaactattatacccaaaacccttaatcctaagtcatcaaaaggaagagcctctattttacacaatgaagaggcatttctaagaatagaaatttagggacgagcacagtggcttactcctttaatatcagcactttgagaggctgatatgggaggttcacttgaagtcaggagttcaaggtcagcttgggcaacatagtgaaacacagtctctacaaaatatttaaaaattagctgggtgtggtggcatgcatctatagtctcagctacttgggagacagagggaggaggcttgctcgagcccaggagttcgtggctatagtgagctatgatcatgccactgcactccagcctggacaacagagcaagaccctgtctctaaaaaagaaaagaaatttggaaatggtttattttgtattaacaatttataatttacactgaaatttattatgataaaacttttccctgtgttaaaaagctattaactttatgaaaaatttcttttaggtaaggttgattatatatacccacacacatacacaggttaaaagttagtttcatgtgacataataactagcattttgagcactacctgtttgcccagcactgttctaagtgctctacatgtattattgttaaattatcataacactatgaattatgtactataattaccccagctttacagatgaggagactaatccatggggaggttaagtaacttgtccaaggccagacagctagagccggcttttggacccacaccacagtctgactccagcacccatattcttaacaatttcaccatattaatatgtcaagattaagcagttttaaaggatgctattttctcacaaatttcttaatatgaacactcaataagaataatcactaatataagcatttagtatttttttaacactaagttggaagcatagtggaacatttatttttagaaatattattaattggctgggctcacgcttgtaatcggctgggctcatgcctgtaaattttgggaggccaaggtaaaagaattgcttgagcccagtatttccagaccagcatgggcaatacattaagacatcatctttaaaaaaaaaatgttattaatctcctctttttgttaaatgtatattatcaaaattgttactaagctaacaaacttcagaaaaacttatgatgggcaagctgcttgtgacattgaaggtatttaagattcaattctagtttggtcctagatgaccacatatccattgttccttcaacgagcacatggtaaagagcctagaacacagagacacagaacacagtggagaaaagggagtgaaatgtctttaatgacacttactatatatgggattttgtgacaatatacaaggatggttaagacatataaggtgatgcaaaaaaacatattaacaattatagtgacaaaaaatgaggagcatataattatacattgatttatacagagtaccagaggaacacagcattgagagccgtaacaccacctgagggagtggagaaaggcttcagagagaaagtgttttttggaatggatcactgtttccaaaagaactaaagtacagtttgagaaatgcatacttaattcattacttttttcccctcaactttaataataaatttacccaacaaaaaagtttatttttgacttgtaaatctcttaaaatcataaaaaagtaaaattagcttttaaaaacaggtagtcaccatagcattgaatgtgtagtttataatacagcaaagttaaatacaatttcaaattacctattaagttagttgctcatttctttgatttcatttagcattgatctaactcaatgtggaagaaggttacattcgtgcaagttaacacggcttaatgattaactatgttcacctaccaaccttaccttttctgggcaaatattggtatatatagagttaagaagtctaggtctgcttccagaagaaaacagttccacgttgcttgaaattgaaaatcaagataaaaatgttcacaattaagctccttctttttattgttcctctagttatttcctccagaattgatcaagacaattcatcatttgattctctatctccagagccaaaatcaagatttgctatgttagacgatgtaaaaattttagccaatggcctccttcagttgggacatggtcttaaagactttgtccataagacgaagggccaaattaatgacatatttcaaaaactcaacatatttgatcagtctttttatgatctatcgctgcaaaccagtgaaatcaaagaagaagaaaaggaactgagaagaactacatataaactacaagtcaaaaatgaagaggtaaagaatatgtcacttgaactcaactcaaaacttgaaagcctcctagaagaaaaaattctacttcaacaaaaagtgaaatatttagaagagcaactaactaacttaattcaaaatcaacctgaaactccagaacacccagaagtaacttcacttaaagtaagtagaaaataaagagggttcatgtttatgttttcaatgtggatcttttaaaaaaaatatttctaaggcatgccatttgaaatactttgttgcattgttgaaatacttttttttccaagaaaaataatctccagaaaataaaatttcctattataatttcaagttagttttttgtttccctaatgttatatatgaaaacactgaaaatttgcattttatatgaaaattacaaatcggttaaattatacaatctagaacactatgtcattacactattgtaaattactgaaggtaagtaaaaagttaaaaaaaatttaaaactattctccagtgtttaaaacagattaaataatacagtaaatggaaaagatttattcatatgaaaatatgctgggctttttcttttaattgaagttcagaaaatcaaattttagagatagtacaatttaaataaaatgttaaggacaaaaatatgtgctatttgaaagaagcatacaaggggaaggaattgccaatattcatttttcaaatccattattagtttaaaaatttagattatgatagtgttacaggaaattaatagaaaagaaagaggaaagcaacttataaccaacctactctctatatccagacttttgtagaaaaacaagataatagcatcaaagaccttctccagaccgtggaagaccaatataaacaattaaaccaacagcatagtcaaataaaagaaatagaaaatcaggtaagtcagtattttaatggtatgtcccatctttcacacaggtctgtaaaaacactgaatcctaaaattatttacaagctttaactggatcatgagtaaaattatcacatcagcataactgttaaaattgcaggctctgaagctaataaactacctgcatttaaaccatggctctaaaactttgtgtgaccttgaataaattacttcacccctttatctctcagtttcctcacatatactacaaagataataacagaacttataggattattgtaagaaaaaaaattaattcatagcagccaatgtcatcttactaaaattcaaattagatcatgtttctctttgctcaaaaccacacaatagctttccatttcactcatattggctctttagaccaagattacccaacccttcgtcatctcactgacttcacctcctctactctagttattctgaccgctttaccagtattcaaacacatcaaacatactgccacctcaaagcctttgcccttgttgtttcctctaactggaacgctcttctgccctggtatctacgtggcccactctctgatttcccttagggtcgttatcaaacaaaaaattcccaatgaagacttacaaggtcacttaaccaaaaatcacaaccgcctggtcccatccctgaaaacttctacttccttagctacttttctcctgcacactcacctttatttaacataacataaattttagttatttatctcttctattcctgcactaaaatgtaagctctgtgaatacagggattttttccattatcttcatattttccattatttgtatatactccagaatatagaatactgtatggcacacagtaggcatttctgttgaattaataaatgtaatgtcatattcacacagaagcgtgtgctatgattattattacttggattactagaaatagtgtgcctcataattaaaggtcaacattcaacaatgtaattaatctacaatgtaaacatctggtgaagtgacagagggaagcacttgtttagaaaaaagctatgtcagaatccatgtattctaatatgcagtacaatagtttaaaaatattaataatactctcaaacagctattcaagaggattcaaaaaacataatataaactcagagaaactggtaaacaaaatcattttcaagagatataaaacaaatattattaccaatttccactaaacaaacataatgttagtagtgctgctaaaaggttttttatcaactacttttggtttccatactttccttcttatgatgttattattctaaattcttttcaattatatcttttactatgattaaatgaacctgctccccaaagcaaaatgttactatagtaatatacattgtgtctaaaaataaaaatgtgtgaagaaaccaaaacaatgaatttctgagttggaagaagagttagatcatttaactttctcatatttaaattaaaaaaacaaaactctaaaaatttaagtaactttaagatcacatagttacttagtagaaaagagtaatacccagcaagcaaactttacaatagatccttttaaataaggtcctaggaaatatcattcatgccagcatcaaaaaactaacactaataatgcaagatattatatattctgcttttcttactgtcaatgagaaaaactatcattcaataaattgcaaacccaacacacttaaataaaaataaaatgttactgctaaactaacgataaactactgaatatatagaaagtaagcaaacaaacttgccaacctgccaacatctacagatatgtttacaggtcaaaaattatcaaattatcaagaaagcctggttcaaattatgtattatgtctttatcacaggtctgaagatcagtaagacctaaaactgaaaattattaaacttaaaatctgaacagaatatcaaatatattttattcatataaataaaagaatacattacaatattctaagcaaagcagtctctacttttggccttgctctgttttccgaccaatgtctgcttttttgccttgctttatttttttatcttattaaataatgtccctgattaaatattttgagaacaggtaatctgtacaatctgaataacactgtttatctaaatatcaaacaccgttataacattatgaactgaaagacaaactgtacttctgacatccttactcagatttcccctaattgtatattcagtatcattttaaaaaacagatttatattcttttatcagctcagaaggactagtattcaagaacccacagaaatttctctatcttccaagccaagagcaccaagaactactccctttcttcagttgaatgaaataagaaatgtaaaacatgatggtaagacactttggtgggtttccttcttgaagctattattatcaaattccctattcttaggacttgttctagactaaaagatagttaagagatatccatcaaatacaatgtatcaacctaaactggatgctggggttctttttacaccctataaaagacatacctaagacaatcagagaaatacaaatatggacttgattattagataatatagaaggtttattaattttcttagatgtgatcatggtattgcagttttaaaggagaacaatctcctgtttaagagatacatgctgaaatatttacggagttaaaggtcactggactccagactggtgatagaacaagactctgtctctaaaaaataattaattttttaaaagaaaatagtttggtaagatgattcttacattcttaaataacacgccatctaagaaaaatgctttaacataaacattactgaaaaaatgctacatttgccacaacttcataaaatgtcaagtgaaatctcaagctccaaagatattattcctattactaaatctgatgtaataacattttattgattctaggcattcctgctgaatgtaccaccatttataacagaggtgaacatacaagtggcatgtatgccatcagacccagcaactctcaagtttttcatgtctactgtgatgttatatcaggtaaaacctgtctaaggagaatagacagtagttagttcaacttactcattacgtattaggaagattaacctggttatcattgttttatacatatatatatgaaatatatatgagtattcgtataaatataatacttttaccttgtttatgtatttactcaatattctccttttcctctaaaataatctgaagtgactattatcaataagtttactatgccaaaattcattaattgcctttcacttaacttttgggaccataataaataataaaatgtattgccataacattaataaactaccttacaaaaccaccaattaaaatcaaacaaacaaaaaagtgttatttacatctgtcaacataaatctactaaaaatacatgatttcattcattatattcaggtagtccatggacattaattcaacatcgaatagatggatcacaaaacttcaatgaaacgtgggagaactacaaatatggttttgggaggcttgatggtaaggggactacattcaatcattcattcacttgctaatctacaaatatttactgagaacctcttatggaccaggtattaggaaaagtagtaacgaacgagaagcagtctcagccttcatataatttattatcaaacaattacacatttgttagtaaattacacttattacaactgttattatttgaattatatttatcacaattacatgtctgttcttaaatatacttatcacaatttaattccacggcttacaatgatcataactataattattaaagacaattttgattaaatgttatgtcataagtagtaactgttacaaataagctgtgaaaagaaccactcctagcattagtcactctattctctcattaacgttttacatatcaattaattggaagttaaaaggaccaggaaactcagacatacagtatacattttaaaatttcaattatttaaatataatatatagaatgtatggcttataatgaattagttaactcaatgcaaattattctattttgattacaaatagtaaaataagcaagataaaataacagatgtttaaaatccaaaaagcacatacaaaaatccatgaatgatgtctaagtactcacttataaagtagaagacattcattattatatcaaatttttaaatgctcagtactatttgaccatttaaaaattttgtattcaaactaccagtgaaagccctacctagaaggtatactcagtgataagttttgtagctccaaatcttctaatagtgagtgtaaccccaaaataaaaggctgacaggtaagtcgagaatactcacttaattctggtaagaaagcaacccatttgtacttgtatttaccagcaatccttaaaatgaagcttcctactaactcaatagcaataagacaatagtgaatgtttaatgaaaacagtattttataaatactttaataaaaaggattgtgatgaagaacaatctatttatatttgttatttgtttttaattccaataaaaataatttttaaaattacagaaaaaagttattaagaaccatgcttttaaatttaaaatgattttttaaatttattcctgtctttttctacaaagaaagcatacattaagcaaataccaaaggccaggtttacatttgaagaaagtgacattattattactcaagtctctaggaatacttaacacatctcttgactgtatatggatgttaataaatagctgacagtaaagtttatccatataaagacttgcaaatattcctctaccaatgacgagactttaaaatatctataataatgtaacacatttcactggtgaaacatgtcttgtcatatgcattatagaaaggataatcagactttcagttatattaatatttttaacatttttgtgcacatagctatcttcaataaaattgttttaaaaggtattattttaagatacactaaaatgatcaagggattcaagactaaacaactcaattagttgcaccaataaaaaacacttaaaaaaactgtcagtgtccaacctgtacttaataactcacagatttttaaaacttttcttttcaggagaattttggttgggcctagagaagatatactccatagtgaagcaatctaattatgttttacgaattgagttggaagactggaaagacaacaaacattatattgaatattctttttacttgggaaatcacgaaaccaactatacgctacatctagttgcgattactggcaatgtccccaatgcaatcccggaaaacaaagatttggtgttttctacttgggatcacaaagcaaaaggacacttcaactgtccagagggttattcaggtatctttttctgataccaatactttattttcatatcttcaaagtatcttcccacattattagctattatctgcaatgacaacttttaaaaatccgaatcccaaataagcgttttctctctagacgaaaacctcttaactataatgaaagtgttcattctagttcaatcaggtattttacctctaatcttcctcagattttctattttttggtagtgtatagattatttatacagattatttaaaattgggacttatacagattatttaaaactgggatacatgcatctaaaacactgtaatatttataagaaaggaagataaacttacggggaaatacagtaacagtaactacatacgagtctgtacccattaaattgcatatctatctcctttaggaggctggtggtggcatgatgagtgtggagaaaacaacctaaatggtaaatataacaaaccaagagcaaaatctaagccagagaggagaagaggattatcttggaagtctcaaaatggaaggttatactctataaaatcaaccaaaatgttgatccatccaacagattcagaaagctttgaatgaactgaggcaaatttaaaaggcaataatttaaacattaacctcattccaagttaatgtggtctaataatctggtattaaatccttaagagaaagcttgagaaatagattttttttatcttaaagtcactgtctatttaagattaaacatacaatcacataaccttaaagaataccgtttacatttctcaatcaaaattcttataatactatttgttttaaattttgtgatgtgggaatcaattttagatggtcacaatctagattataatcaataggtgaacttattaaataacttttctaaataaaaaatttagagacttttattttaaaaggcatcatatgagctaatatcacaactttcccagtttaaaaaactagtactcttgttaaaactctaaacttgactaaatacagaggactggtaattgtacagttcttaaatgttgtagtattaatttcaaaactaaaaatcgtcagcacagagtatgtgtaaaaatctgtaatacaaatttttaaactgatgcttcattttgctacaaaataatttggagtaaatgtttgatatgatttatttatgaaacctaatgaagcagaattaaatactgtattaaaataagttcgctgtctttaaacaaatggagatgactactaagtcacattgactttaacatgaggtatcactataccttatttgttaaaatatatactgtatacattttatatattttaacacttaatactatgaaaacaaataattgtaaaggaatcttgtcagattacagtaagaatgaacatatttgtggcatcgagttaaagtttatatttcccctaaatatgctgtgattctaatacattcgtgtaggttttcaagtagaaataaacctcgtaacaagttactgaacgtttaaacagcctgacaagcatgtatatatgtttaaaattcaataaacaaagacccagtccctaaattatagaaatttaaattattcttgcatgtttatcgacatcacaacagatccctaaatccctaaatccctaaagattagatacaaattttttaccacagtatcacttgtcagaatttatttttaaatatgattttttaaaactgccagtaagaaattttaaattaaacccatttgttaaaggatatagtgcccaagttatatggtgacctacctttgtcaatacttagcattatgtatttcaaattatccaatatacatgtcatatatatttttatatgtcacatatataaaagatatgtatgatctatgtgaatcctaagtaaatattttgttccagaaaagtacaaaataataaaggtaaaaataatctataattttcaggaccacagactaagctgtcgaaattaacgctgatttttttagggccagaataccaaaatggctcctctcttcccccaaaattggacaatttcaaatgcaaaataattcattatttaatatatgagttgcttcctctatttggtttccttaaaaaaaaaaaaaactctcataggacatgtttcattttgttcctttcaggagtagtaaattagacgttttccccatataaagcttttttctaccagaaagatacttctggtagaagaagagaaaggagctctttatggttcacacgactgtctcctgtcctaactactttgcttaaagtgctcaaattccatcactactcacagttgtctaatctaagtctaatcccctttgatctctcagactaccttcccttttatctctctactacttaataataagaatatctttttttcaaacttgaccttcattttgctttcacaatactatactctccatggattatcccttatctgaatccatctttataaccctattcctttctcatatttagtactgtgggccaatggacaaccttcaatcatcttttctacactgaccctcagacattctatctgctctcacggactcctttatttaccatgaataaagttccaaaatctacatattcatcccaagtctctttccagttccccttcttacattgcctatttgccatttctcccttcaataccctatacttcactcaaattcaacataccaaaaataaaaggccaggcacggtggctcacacctgtaatcccaggactttgggaggctgaggcaggtggatcacctgaggtcaggagtctgaccagcctgaccaatatggtgaaaccccgtctctacctaaaatacaaaaattagccaggcgtggtggcatgtgcctacagtcccagctactcaagaggctgagacaggagaatcgcttgaacccaggaggcggaggttgcagtgagctgagatcacaccaatgcactgggtgacagaacaagactgactcaaaaaaaaataaataacaaattccccagccccttactgctactgctatccctttctacccacctttccctcctttatactctttcacaccatcttcctcacttctttatatccattaatatgaccagcatgttcccagtcacagaagcctggaacccggaagacatctctggcttttcactcaactttgtaaactacctcttttgtatcataagccaccaagttcaatacaatcttctcttgaaacgtctcttaatcttataagctttcttccccaaagactgtctttaacttcagtgctagattatataagt

SEQ ID NO: 109 - protein, 460 aa, Homo sapiens
MFTIKLLLFIVPLVISSRIDQDNSSFDSLSPEPKSRFAMLDDVKILANGLLQLGHGLKDFVHKTKGQINDIFQKLNIFDQSFYDLSLQTSEIKEEEKELRRTTYKLQVKNEEVKNMSLELNSKLESLLEEKILLQQKVKYLEEQLTNLIQNQPETPEHPEVTSLKTFVEKQDNSIKDLLQTVEDQYKQLNQQHSQIKEIENQLRRTSIQEPTEISLSSKPRAPRTTPFLQLNEIRNVKHDGIPAECTTIYNRGEHTSGMYAIRPSNSQVFHVYCDVISGSPWTLIQHRIDGSQNFNETWENYKYGFGRLDGEFWLGLEKIYSIVKQSNYVLRIELEDWKDNKHYIEYSFYLGNHETNYTLHLVAITGNVPNAIPENKDLVFSTWDHKAKGHFNCPEGYSGGWWWHDECGENNLNGKYNKPRAKSKPERRRGLSWKSQNGRLYSIKSTKMLIHPTDSESFE

SEQ ID NO: 110 - protein, 4548 aa, Homo sapiens
MEHKEVVLLLLLFLKSAAPEQSHVVQDCYHGDGQSYRGTYSTTVTGRTCQAWSSMTPHQHNRTTENYPNAGLIMNYCRNPDAVAAPYCYTRDPGVRWEYCNLTQCSDAEGTAVAPPTVTPVPSLEAPSEQAPTEQRPGVQECYHGNGQSYRGTYSTTVTGRTCQAWSSMTPHSHSRTPEYYPNAGLIMNYCRNPDAVAAPYCYTRDPGVRWEYCNLTQCSDAEGTAVAPPTVTPVPSLEAPSEQAPTEQRPGVQECYHGNGQSYRGTYSTTVTGRTCQAWSSMTPHSHSRTPEYYPNAGLIMNYCRNPDAVAAPYCYTRDPGVRWEYCNLTQCSDAEGTAVAPPTVTPVPSLEAPSEQAPTEQRPGVQECYHGNGQSYRGTYSTTVTGRTCQAWSSMTPHSHSRTPEYYPNAGLIMNYCRNPDAVAAPYCYTRDPGVRWEYCNLTQCSDAEGTAVAPPTVTPVPSLEAPSEQAPTEQRPGVQECYHGNGQSYRGTYSTTVTGRTCQAWSSMTPHSHSRTPEYYPNAGLIMNYCRNPDAVAAPYCYTRDPGVRWEYCNLTQCSDAEGTAVAPPTVTPVPSLEAPSEQAPTEQRPGVQECYHGNGQSYRGTYSTTVTGRTCQAWSSMTPHSHSRTPEYYPNAGLIMNYCRNPDAVAAPYCYTRDPGVRWEYCNLTQCSDAEGTAVAPPTVTPVPSLEAPSEQAPTEQRPGVQECYHGNGQSYRGTYSTTVTGRTCQAWSSMTPHSHSRTPEYYPNAGLIMNYCRNPDAVAAPYCYTRDPGVRWEYCNLTQCSDAEGTAVAPPTVTPVPSLEAPSEQAPTEQRPGVQECYHGNGQSYRGTYSTTVTGRTCQAWSSMTPHSHSRTPEYYPNAGLIMNYCRNPDAVAAPYCYTRDPGVRWEYCNLTQCSDAEGTAVAPPTVTPVPSLEAPSEQAPTEQRPGVQECYHGNGQSYRGTYSTTVTGRTCQAWSSMTPHSHSRTPEYYPNAGLIMNYCRNPDAVAAPYCYTRDPGVRWEYCNLTQCSDAEGTAVAPPTVTPVPSLEAPSEQAPTEQRPGVQECYHGNGQSYRGTYSTTVTGRTCQAWSSMTPHSHSRTPEYYPNAGLIMNYCRNPDAVAAPYCYTRDPGVRWEYCNLTQCSDAEGTAVAPPTVTPVPSLEAPSEQAPTEQRPGVQECYHGNGQSYRGTYSTTVTGRTCQAWSSMTPHSHSRTPEYYPNAGLIMNYCRNPDAVAAPYCYTRDPGVRWEYCNLTQCSDAEGTAVAPPTVTPVPSLEAPSEQAPTEQRPGVQECYHGNGQSYRGTYSTTVTGRTCQAWSSMTPHSHSRTPEYYPNAGLIMNYCRNPDAVAAPYCYTRDPGVRWEYCNLTQCSDAEGTAVAPPTVTPVPSLEAPSEQAPTEQRPGVQECYHGNGQSYRGTYSTTVTGRTCQAWSSMTPHSHSRTPEYYPNAGLIMNYCRNPDAVAAPYCYTRDPGVRWEYCNLTQCSDAEGTAVAPPTVTPVPSLEAPSEQAPTEQRPGVQECYHGNGQSYRGTYSTTVTGRTCQAWSSMTPHSHSRTPEYYPNAGLIMNYCRNPDAVAAPYCYTRDPGVRWEYCNLTQCSDAEGTAVAPPTVTPVPSLEAPSEQAPTEQRPGVQECYHGNGQSYRGTYSTTVTGRTCQAWSSMTPHSHSRTPEYYPNAGLIMNYCRNPDAVAAPYCYTRDPGVRWEYCNLTQCSDAEGTAVAPPTVTPVPSLEAPSEQAPTEQRPGVQECYHGNGQSYRGTYSTTVTGRTCQAWSSMTPHSHSRTPEYYPNAGLIMNYCRNPDAVAAPYCYTRDPGVRWEYCNLTQCSDAEGTAVAPPTVTPVPSLEAPSEQAPTEQRPGVQECYHGNGQSYRGTYSTTVTGRTCQAWSSMTPHSHSRTPEYYPNAGLIMNYCRNPDAVAAPYCYTRDPGVRWEYCNLTQCSDAEGTAVAPPTVTPVPSLEAPSEQAPTEQRPGVQECYHGNGQSYRGTYSTTVTGRTCQAWSSMTPHSHSRTPEYYPNAGLIMNYCRNPDAVAAPYCYTRDPGVRWEYCNLTQCSDAEGTAVAPPTVTPVPSLEAPSEQAPTEQRPGVQECYHGNGQSYRGTYSTTVTGRTCQAWSSMTPHSHSRTPEYYPNAGLIMNYCRNPDAVAAPYCYTRDPGVRWEYCNLTQCSDAEGTAVAPPTVTPVPSLEAPSEQAPTEQRPGVQECYHGNGQSYRGTYSTTVTGRTCQAWSSMTPHSHSRTPEYYPNAGLIMNYCRNPDAVAAPYCYTRDPGVRWEYCNLTQCSDAEGTAVAPPTVTPVPSLEAPSEQAPTEQRPGVQECYHGNGQSYRGTYSTTVTGRTCQAWSSMTPHSHSRTPEYYPNAGLIMNYCRNPDAVAAPYCYTRDPGVRWEYCNLTQCSDAEGTAVAPPTVTPVPSLEAPSEQAPTEQRPGVQECYHGNGQSYRGTYSTTVTGRTCQAWSSMTPHSHSRTPEYYPNAGLIMNYCRNPDAVAAPYCYTRDPGVRWEYCNLTQCSDAEGTAVAPPTVTPVPSLEAPSEQAPTEQRPGVQECYHGNGQSYRGTYSTTVTGRTCQAWSSMTPHSHSRTPEYYPNAGLIMNYCRNPDAVAAPYCYTRDPGVRWEYCNLTQCSDAEGTAVAPPTVTPVPSLEAPSEQAPTEQRPGVQECYHGNGQSYRGTYSTTVTGRTCQAWSSMTPHSHSRTPEYYPNAGLIMNYCRNPDAVAAPYCYTRDPGVRWEYCNLTQCSDAEGTAVAPPTVTPVPSLEAPSEQAPTEQRPGVQECYHGNGQSYRGTYSTTVTGRTCQAWSSMTPHSHSRTPEYYPNAGLIMNYCRNPDAVAAPYCYTRDPGVRWEYCNLTQCSDAEGTAVAPPTVTPVPSLEAPSEQAPTEQRPGVQECYHGNGQSYRGTYSTTVTGRTCQAWSSMTPHSHSRTPEYYPNAGLIMNYCRNPDAVAAPYCYTRDPGVRWEYCNLTQCSDAEGTAVAPPTVTPVPSLEAPSEQAPTEQRPGVQECYHGNGQSYRGTYSTTVTGRTCQAWSSMTPHSHSRTPEYYPNAGLIMNYCRNPDAVAAPYCYTRDPGVRWEYCNLTQCSDAEGTAVAPPTVTPVPSLEAPSEQAPTEQRPGVQECYHGNGQSYRGTYSTTVTGRTCQAWSSMTPHSHSRTPEYYPNAGLIMNYCRNPDAVAAPYCYTRDPGVRWEYCNLTQCSDAEGTAVAPPTVTPVPSLEAPSEQAPTEQRPGVQECYHGNGQSYRGTYSTTVTGRTCQAWSSMTPHSHSRTPEYYPNAGLIMNYCRNPDAVAAPYCYTRDPGVRWEYCNLTQCSDAEGTAVAPPTVTPVPSLEAPSEQAPTEQRPGVQECYHGNGQSYRGTYSTTVTGRTCQAWSSMTPHSHSRTPEYYPNAGLIMNYCRNPDPVAAPYCYTRDPSVRWEYCNLTQCSDAEGTAVAPPTITPIPSLEAPSEQAPTEQRPGVQECYHGNGQSYQGTYFITVTGRTCQAWSSMTPHSHSRTPAYYPNAGLIKNYCRNPDPVAAPWCYTTDPSVRWEYCNLTRCSDAEWTAFVPPNVILAPSLEAFFEQALTEETPGVQDCYYHYGQSYRGTYSTTVTGRTCQAWSSMTPHQHSRTPENYPNAGLTRNYCRNPDAEIRPWCYTMDPSVRWEYCNLTQCLVTESSVLATLTVVPDPSTEASSEEAPTEQSPGVQDCYHGDGQSYRGSFSTTVTGRTCQSWSSMTPHWHQRTTEYYPNGGLTRNYCRNPDAEISPWCYTMDPNVRWEYCNLTQCPVTESSVLATSTAVSEQAPTEQSPTVQDCYHGDGQSYRGSFSTTVTGRTCQSWSSMTPHWHQRTTEYYPNGGLTRNYCRNPDAEIRPWCYTMDPSVRWEYCNLTQCPVMESTLLTTPTVVPVPSTELPSEEAPTENSTGVQDCYRGDGQSYRGTLSTTITGRTCQSWSSMTPHWHRRIPLYYPNAGLTRNYCRNPDAEIRPWCYTMDPSVRWEYCNLTRCPVTESSVLTTPTVAPVPSTEAPSEQAPPEKSPVVQDCYHGDGRSYRGISSTTVTGRTCQSWSSMIPHWHQRTPENYPNAGLTENYCRNPDSGKQPWCYTTDPCVRWEYCNLTQCSETESGVLETPTVVPVPSMEAHSEAAPTEQTPVVRQCYHGNGQSYRGTFSTTVTGRTCQSWSSMTPHRHQRTPENYPNDGLTMNYCRNPDADTGPWCFTMDPSIRWEYCNLTRCSDTEGTVVAPPTVIQVPSLGPPSEQDCMFGNGKGYRGKKATTVTGTPCQEWAAQEPHRHSTFIPGTNKWAGLEKNYCRNPDGDINGPWCYTMNPRKLFDYCDIPLCASSSFDCGKPQVEPKKCPGSIVGGCVAHPHSWPWQVSLRTRFGKHFCGGTLISPEWVLTAAHCLKKSSRPSSYKVILGAHQEVNLESHVQEIEVSRLFLEPTQADIALLKLSRPAVITDKVMPACLPSPDYMVTARTECYITGWGETQGTFGTGLLKEAQLLVIENEVCNHYKYICAEHLARGTDSCQGDSGGPLVCFEKDKYILQGVTSWGLGCARPNKPGVYARVSRFVTWIEGMMRNN

SEQ ID NO: 111 - DNA, 75 bp, synthetic construct
  source 1..75: mol_type = other DNA; note = Description of Artificial Sequence: Synthetic oligonucleotide
cttctttttattgttcctctagttatttcctccagaattgatcaagactattcatcatttgattctctatctcca

SEQ ID NO: 112 - DNA, 23 bp, synthetic construct
  source 1..23: mol_type = other DNA; note = Description of Artificial Sequence: Synthetic oligonucleotide
aaaatcaagataaaaatgttcac

SEQ ID NO: 113 - DNA, 23 bp, synthetic construct
  source 1..23: mol_type = other DNA; note = Description of Artificial Sequence: Synthetic oligonucleotide
agctccttctttttattgttcct

SEQ ID NO: 114 - DNA, 23 bp, synthetic construct
  source 1..23: mol_type = other DNA; note = Description of Artificial Sequence: Synthetic oligonucleotide
cctccagaattgatcaagacaat

SEQ ID NO: 115 - DNA, 23 bp, synthetic construct
  source 1..23: mol_type = other DNA; note = Description of Artificial Sequence: Synthetic oligonucleotide
atcaagacaattcatcatttgat

SEQ ID NO: 116 - DNA, 23 bp, synthetic construct
  source 1..23: mol_type = other DNA; note = Description of Artificial Sequence: Synthetic oligonucleotide
atcatttgattctctatctccag

SEQ ID NO: 117 - DNA, 23 bp, synthetic construct
  source 1..23: mol_type = other DNA; note = Description of Artificial Sequence: Synthetic oligonucleotide
gattctctatctccagagccaaa

SEQ ID NO: 118 - DNA, 23 bp, synthetic construct
  source 1..23: mol_type = other DNA; note = Description of Artificial Sequence: Synthetic oligonucleotide
tctatctccagagccaaaatcaa

SEQ ID NO: 119 - DNA, 23 bp, synthetic construct
  source 1..23: mol_type = other DNA; note = Description of Artificial Sequence: Synthetic oligonucleotide
gctatgttagacgatgtaaaaat

SEQ ID NO: 120 - DNA, 23 bp, synthetic construct
  source 1..23: mol_type = other DNA; note = Description of Artificial Sequence: Synthetic oligonucleotide
atgacatatttcaaaaactcaac

SEQ ID NO: 121 - DNA, 76 bp, synthetic construct
  source 1..76: mol_type = other DNA; note = Description of Artificial Sequence: Synthetic oligonucleotide
ttcctccagaattgatcaagacaattcatcatttgattctctatctccagagccaaaatcaagatttgctatgtta

SEQ ID NO: 122 - DNA, 23 bp, synthetic construct
  source 1..23: mol_type = other DNA; note = Description of Artificial Sequence: Synthetic oligonucleotide
gatcagtctttttatgatctatc

SEQ ID NO: 123 - DNA, 75 bp, synthetic construct
  source 1..75: mol_type = other DNA; note = Description of Artificial Sequence: Synthetic oligonucleotide
atcaagacaattcatcatttgattctctatctccagagccaaaatcaagatttgctatgttagacgatgtaaaaa

SEQ ID NO: 124 - DNA, 75 bp, synthetic construct
  source 1..75: mol_type = other DNA; note = Description of Artificial Sequence: Synthetic oligonucleotide
  misc_difference 41: note = modified_base - a, c, t, g, unknown or other
  misc_difference 45: note = modified_base - a, c, t, g, unknown or other
  misc_difference 55: note = modified_base - a, c, t, g, unknown or other
  misc_difference 57: note = modified_base - a, c, t, g, unknown or other
  misc_difference 74: note = modified_base - a, c, t, g, unknown or other
tctacttcaacaaaaagtgaaatatttagaagagcaactanctancttaattcanantcaacctgaaactccana

SEQ ID NO: 125 - DNA, 23 bp, synthetic construct
  source 1..23: mol_type = other DNA; note = Description of Artificial Sequence: Synthetic oligonucleotide
aaaatcaacctgaaactccagaa

SEQ ID NO: 126 - DNA, 75 bp, synthetic construct
  source 1..75: mol_type = other DNA; note = Description of Artificial Sequence: Synthetic oligonucleotide
ttttatcagctcagaaggactagtattcaagaacccacagaaatttctctatcttccaagccaagagcaccaaga

SEQ ID NO: 127 - DNA, 23 bp, synthetic construct
  source 1..23: mol_type = other DNA; note = Description of Artificial Sequence: Synthetic oligonucleotide
tcttgatcaattctggaggaaat

SEQ ID NO: 128 - DNA, 23 bp, synthetic construct
  source 1..23: mol_type = other DNA; note = Description of Artificial Sequence: Synthetic oligonucleotide
atttggcccttcgtcttatggac

SEQ ID NO: 129 - DNA, 23 bp, synthetic construct
  source 1..23: mol_type = other DNA; note = Description of Artificial Sequence: Synthetic oligonucleotide
cactggtttgcagcgatagatca

SEQ ID NO: 130 - DNA, 23 bp, synthetic construct
  source 1..23: mol_type = other DNA; note = Description of Artificial Sequence: Synthetic oligonucleotide
ttgacttgtagtttatatgtagt

SEQ ID NO: 131 - DNA, 23 bp, synthetic construct
  source 1..23: mol_type = other DNA; note = Description of Artificial Sequence: Synthetic oligonucleotide
tttacctcttcatttttgacttg

SEQ ID NO: 132 - DNA, 23 bp, synthetic construct
  source 1..23: mol_type = other DNA; note = Description of Artificial Sequence: Synthetic oligonucleotide
tttcttctaggaggctttcaagt

SEQ ID NO: 133 - DNA, 23 bp, synthetic construct
  source 1..23: mol_type = other DNA; note = Description of Artificial Sequence: Synthetic oligonucleotide
cactttttgttgaagtagaattt

SEQ ID NO: 134 - DNA, 23 bp, synthetic construct
  source 1..23: mol_type = other DNA; note = Description of Artificial Sequence: Synthetic oligonucleotide
agttagttagttgctcttctaaa

SEQ ID NO: 135 - DNA, 23 bp, synthetic construct
  source 1..23: mol_type = other DNA; note = Description of Artificial Sequence: Synthetic oligonucleotide
tgaattaagttagttagttgctc

SEQ ID NO: 136 - DNA, 23 bp, synthetic construct
  source 1..23: mol_type = other DNA; note = Description of Artificial Sequence: Synthetic oligonucleotide
ttttatcagctcagaaggactag

SEQ ID NO: 137 - DNA, 75 bp, synthetic construct
  source 1..75: mol_type = other DNA; note = Description of Artificial Sequence: Synthetic oligonucleotide
tagtattcaagaacccacagaaatttctctatcttccaagccaagagcaccaagaactactccctttcttcagtt

SEQ ID NO: 138 - DNA, 23 bp, synthetic construct
  source 1..23: mol_type = other DNA; note = Description of Artificial Sequence: Synthetic oligonucleotide
ctctatcttccaagccaagagca

SEQ ID NO: 139 - DNA, 23 bp, synthetic construct
  source 1..23: mol_type = other DNA; note = Description of Artificial Sequence: Synthetic oligonucleotide
ctgtgggttcttgaatactagtc

SEQ ID NO: 140 - DNA, 23 bp, synthetic construct
  source 1..23: mol_type = other DNA; note = Description of Artificial Sequence: Synthetic oligonucleotide
aactgaagaaagggagtagttct

SEQ ID NO: 141 - DNA, 23 bp, synthetic construct
  source 1..23: mol_type = other DNA; note = Description of Artificial Sequence: Synthetic oligonucleotide
cattcaactgaagaaagggagta

SEQ ID NO: 142 - DNA, 23 bp, synthetic construct
  source 1..23: mol_type = other DNA; note = Description of Artificial Sequence: Synthetic oligonucleotide
cttatttcattcaactgaagaaa

SEQ ID NO: 143 - DNA, 23 bp, synthetic construct
  source 1..23: mol_type = other DNA; note = Description of Artificial Sequence: Synthetic oligonucleotide
ttatcttgattttcaatttcaag

SEQ ID NO: 144 - DNA, 75 bp, synthetic construct
  source 1..75: mol_type = other DNA; note = Description of Artificial Sequence: Synthetic oligonucleotide
ccgtggaagaccaatataaacaattaaaccaacagcatagtcaaataaaagaaatagaaaatcaggtaagtcagt

SEQ ID NO: 145 - DNA, 23 bp, synthetic construct
  source 1..23: mol_type = other DNA; note = Description of Artificial Sequence: Synthetic oligonucleotide
tctatttcttttatttgactatg

SEQ ID NO: 146 - DNA, 23 bp, synthetic construct
  source 1..23: mol_type = other DNA; note = Description of Artificial Sequence: Synthetic oligonucleotide
gactatgctgttggtttaattgt

SEQ ID NO: 147 - DNA, 23 bp, synthetic construct
  source 1..23: mol_type = other DNA; note = Description of Artificial Sequence: Synthetic oligonucleotide
tttatattggtcttccacggtct

SEQ ID NO: 148 - DNA, 23 bp, synthetic construct
  source 1..23: mol_type = other DNA; note = Description of Artificial Sequence: Synthetic oligonucleotide
gtcttccacggtctggagaaggt

SEQ ID NO: 149 - DNA, 23 bp, synthetic construct
  source 1..23: mol_type = other DNA; note = Description of Artificial Sequence: Synthetic oligonucleotide
tcttgtttttctacaaaagtctg

SEQ ID NO: 150 - DNA, 23 bp, synthetic construct
  source 1..23: mol_type = other DNA; note = Description of Artificial Sequence: Synthetic oligonucleotide
tattgattctaggcattcctgct

SEQ ID NO: 151 - DNA, 23 bp, synthetic construct
  source 1..23: mol_type = other DNA; note = Description of Artificial Sequence: Synthetic oligonucleotide
taggcattcctgctgaatgtacc

SEQ ID NO: 152 - DNA, 23 bp, synthetic construct
  source 1..23: mol_type = other DNA; note = Description of Artificial Sequence: Synthetic oligonucleotide
ctgctgaatgtaccaccatttat

SEQ ID NO: 153 - DNA, 23 bp, synthetic construct
  source 1..23: mol_type = other DNA; note = Description of Artificial Sequence: Synthetic oligonucleotide
ataacagaggtgaacatacaagt

SEQ ID NO: 154 - DNA, 23 bp, synthetic construct
  source 1..23: mol_type = other DNA; note = Description of Artificial Sequence: Synthetic oligonucleotide
agcaggaatgcctagaatcaata

SEQ ID NO: 155 - DNA, 23 bp, synthetic construct
  source 1..23: mol_type = other DNA; note = Description of Artificial Sequence: Synthetic oligonucleotide
cattcattatattcaggtagtcc

SEQ ID NO: 156 - DNA, 23 bp, synthetic construct
  source 1..23: mol_type = other DNA; note = Description of Artificial Sequence: Synthetic oligonucleotide
attatattcaggtagtccatgga

SEQ ID NO: 157 - DNA, 23 bp, synthetic construct
  source 1..23: mol_type = other DNA; note = Description of Artificial Sequence: Synthetic oligonucleotide
tattcaggtagtccatggacatt

SEQ ID NO: 158 - DNA, 74 bp, synthetic construct
  source 1..74: mol_type = other DNA; note = Description of Artificial Sequence: Synthetic oligonucleotide
aatacatgatttcattcattatattcaggtagtccatggacattaattcaacatcgaatagatggatcacaaaa

SEQ ID NO: 159 - DNA, 23 bp, synthetic construct
  source 1..23: mol_type = other DNA; note = Description of Artificial Sequence: Synthetic oligonucleotide
attcaacatcgaatagatggatc

SEQ ID NO: 160 - DNA, 23 bp, synthetic construct
  source 1..23: mol_type = other DNA; note = Description of Artificial Sequence: Synthetic oligonucleotide
aacatcgaatagatggatcacaa

SEQ ID NO: 161 - DNA, 23 bp, synthetic construct
  source 1..23: mol_type = other DNA; note = Description of Artificial Sequence: Synthetic oligonucleotide
aatgtagtccccttaccatcaag

SEQ ID NO: 162 - DNA, 23 bp, synthetic construct
  source 1..23: mol_type = other DNA; note = Description of Artificial Sequence: Synthetic oligonucleotide
gtagttctcccacgtttcattga

SEQ ID NO: 163 - DNA, 23 bp, synthetic construct
  source 1..23: mol_type = other DNA; note = Description of Artificial Sequence: Synthetic oligonucleotide
aagttttgtgatccatctattcg

SEQ ID NO: 164 - DNA, 23 bp, synthetic construct
  source 1..23: mol_type = other DNA; note = Description of Artificial Sequence: Synthetic oligonucleotide
gatgttgaattaatgtccatgga

SEQ ID NO: 165 - DNA, 23 bp, synthetic construct
  source 1..23: mol_type = other DNA; note = Description of Artificial Sequence: Synthetic oligonucleotide
atgtccatggactacctgaatat

SEQ ID NO: 166 - DNA, 23 bp, synthetic construct
  source 1..23: mol_type = other DNA; note = Description of Artificial Sequence: Synthetic oligonucleotide
agttggaagactggaaagacaac

SEQ ID NO: 167 - DNA, 23 bp, synthetic construct
  source 1..23: mol_type = other DNA; note = Description of Artificial Sequence: Synthetic oligonucleotide
tattgaatattctttttacttgg

SEQ ID NO: 168 - DNA, 23 bp, synthetic construct
  source 1..23: mol_type = other DNA; note = Description of Artificial Sequence: Synthetic oligonucleotide
aatattctttttacttgggaaat

SEQ ID NO: 169 - DNA, 23 bp, synthetic construct
  source 1..23: mol_type = other DNA; note = Description of Artificial Sequence: Synthetic oligonucleotide
tttttacttgggaaatcacgaaa

SEQ ID NO: 170 - DNA, 76 bp, synthetic construct
  source 1..76: mol_type = other DNA; note = Description of Artificial Sequence: Synthetic oligonucleotide
tatacgctacatctagttgcgattactggcaatgtccccaatgcaatcccggaaaacaaagatttggtgttttcta

SEQ ID NO: 171 - DNA, 75 bp, synthetic construct
  source 1..75: mol_type = other DNA; note = Description of Artificial Sequence: Synthetic oligonucleotide
accaactatacgctacatctagttgcgattactggcaatgtccccaatgcaatcccggaaaacaaagatttggtg

SEQ ID NO: 172 - DNA, 23 bp, synthetic construct
  source 1..23: mol_type = other DNA; note = Description of Artificial Sequence: Synthetic oligonucleotide
gggacattgccagtaatcgcaac

SEQ ID NO: 173 - DNA, 23 bp, synthetic construct
  source 1..23: mol_type = other DNA; note = Description of Artificial Sequence: Synthetic oligonucleotide
ccagtaatcgcaactagatgtag

SEQ ID NO: 174 - DNA, 23 bp, synthetic construct
  source 1..23: mol_type = other DNA; note = Description of Artificial Sequence: Synthetic oligonucleotide
gattactggcaatgtccccaatg

SEQ ID NO: 175 - DNA, 75 bp, synthetic construct
  source 1..75: mol_type = other DNA; note = Description of Artificial Sequence: Synthetic oligonucleotide
gaagactggaaagacaacaaacattatattgaatattctttttacttgggaaatcacaaaaccaactatacgcta

SEQ ID NO: 176 - DNA, 23 bp, synthetic construct
  source 1..23: mol_type = other DNA; note = Description of Artificial Sequence: Synthetic oligonucleotide
gtaaaacataattagattgcttc

SEQ ID NO: 177 - DNA, 23 bp, synthetic construct
  source 1..23: mol_type = other DNA; note = Description of Artificial Sequence: Synthetic oligonucleotide
gattgcttcactatggagtatat

SEQ ID NO: 178 - DNA, 23 bp, synthetic construct
  source 1..23: mol_type = other DNA; note = Description of Artificial Sequence: Synthetic oligonucleotide
cttcactatggagtatatcttct

SEQ ID NO: 179 - DNA, 23 bp, synthetic construct
  source 1..23: mol_type = other DNA; note = Description of Artificial Sequence: Synthetic oligonucleotide
tcttggaagtctcaaaatggaag

SEQ ID NO: 180 - DNA, 23 bp, synthetic construct
  source 1..23: mol_type = other DNA; note = Description of Artificial Sequence: Synthetic oligonucleotide
gcctcagttcattcaaagctttc

SEQ ID NO: 181 - DNA, 23 bp, synthetic construct
  source 1..23: mol_type = other DNA; note = Description of Artificial Sequence: Synthetic oligonucleotide
tgagacttccaagataatcctct

SEQ ID NO: 182 - DNA, 23 bp, synthetic construct
  source 1..23: mol_type = other DNA; note = Description of Artificial Sequence: Synthetic oligonucleotide
accatttaggttgttttctccac

SEQ ID NO: 183 - DNA, 23 bp, synthetic construct
  source 1..23: mol_type = other DNA; note = Description of Artificial Sequence: Synthetic oligonucleotide
attgttcctctagttatttcctc

SEQ ID NO: 184 - DNA, 23 bp, synthetic construct
  source 1..23: mol_type = other DNA; note = Description of Artificial Sequence: Synthetic oligonucleotide
ttgttcctctagttatttcctcc

SEQ ID NO: 185 - DNA, 23 bp, synthetic construct
  source 1..23: mol_type = other DNA; note = Description of Artificial Sequence: Synthetic oligonucleotide
tccataagacgaagggccaaatt

SEQ ID NO: 186 - DNA, 23 bp, synthetic construct
  source 1..23: mol_type = other DNA; note = Description of Artificial Sequence: Synthetic oligonucleotide
tatgatctatcgctgcaaaccag

SEQ ID NO: 187 - DNA, 23 bp, synthetic construct
  source 1..23: mol_type = other DNA; note = Description of Artificial Sequence: Synthetic oligonucleotide
atgatctatcgctgcaaaccagt

SEQ ID NO: 188 - DNA, 23 bp, synthetic construct
  source 1..23: mol_type = other DNA; note = Description of Artificial Sequence: Synthetic oligonucleotide
attgaatattctttttacttggg

SEQ ID NO: 189 - DNA, 23 bp, synthetic construct
  source 1..23: mol_type = other DNA; note = Description of Artificial Sequence: Synthetic oligonucleotide
gagttgagttcaagtgacatatt

SEQ ID NO: 190 - DNA, 75 bp, synthetic construct
  source 1..75: mol_type = other DNA; note = Description of Artificial Sequence: Synthetic oligonucleotide
ttacgaattgagttggaagactggaaagacaacaaacattatattgaatattctttttacttgggaaatcacgaa

SEQ ID NO: 191 - DNA, 23 bp, synthetic construct
  source 1..23: mol_type = other DNA; note = Description of Artificial Sequence: Synthetic oligonucleotide
ggaaagacaacaaacattatatt

SEQ ID NO: 192 - DNA, 75 bp, synthetic construct
  source 1..75: mol_type = other DNA; note = Description of Artificial Sequence: Synthetic oligonucleotide
aaatgttgatccatccaacagattcagaaagctttgaatgaactgaggcaaatttaaaaggcaataatttaaaca

SEQ ID NO: 193 - DNA, 23 bp, synthetic construct
  source 1..23: mol_type = other DNA; note = Description of Artificial Sequence: Synthetic oligonucleotide
gaaagctttgaatgaactgaggc

SEQ ID NO: 194 - DNA, 75 bp, synthetic construct
  source 1..75: mol_type = other DNA; note = Description of Artificial Sequence: Synthetic oligonucleotide
tacttcaacaaaaagtgaaatatttagaagagcaactaactaacttaattcaaaatcaacctgaaactccagaac

SEQ ID NO: 195 - RNA, 99 nt, synthetic construct
  source 1..99: mol_type = other RNA; note = Description of Artificial Sequence: Synthetic oligonucleotide
  misc_difference 80: note = modified_base - a, c, u, g, unknown or other
  misc_difference 81: note = modified_base - a, c, u, g, unknown or other
  misc_difference 82: note = modified_base - a, c, u, g, unknown or other
  misc_difference 83: note = modified_base - a, c, u, g, unknown or other
  misc_difference 84: note = modified_base - a, c, u, g, unknown or other
  misc_difference 85: note = modified_base - a, c, u, g, unknown or other
  misc_difference 86: note = modified_base - a, c, u, g, unknown or other
  misc_difference 87: note = modified_base - a, c, u, g, unknown or other
  misc_difference 88: note = modified_base - a, c, u, g, unknown or other
  misc_difference 89: note = modified_base - a, c, u, g, unknown or other
  misc_difference 90: note = modified_base - a, c, u, g, unknown or other
  misc_difference 91: note = modified_base - a, c, u, g, unknown or other
  misc_difference 92: note = modified_base - a, c, u, g, unknown or other
  misc_difference 93: note = modified_base - a, c, u, g, unknown or other
  misc_difference 94: note = modified_base - a, c, u, g, unknown or other
  misc_difference 95: note = modified_base - a, c, u, g, unknown or other
  misc_difference 96: note = modified_base - a, c, u, g, unknown or other
  misc_difference 97: note = modified_base - a, c, u, g, unknown or other
  misc_difference 98: note = modified_base - a, c, u, g, unknown or other
  misc_difference 99: note = modified_base - a, c, u, g, unknown or other
ggtctagaggacagaattcaacgggtgtgctaatggccactttccaggtggcaaagcccgttgagcttcgaagtggcacnnnnnnnnnnnnnnnnnnnn

SEQ ID NO: 196 - RNA, 116 nt, synthetic construct
  source 1..116: mol_type = other RNA; note = Description of Artificial Sequence: Synthetic polynucleotide
  misc_difference 97: note = modified_base - a, c, u, g, unknown or other
  misc_difference 98: note = modified_base - a, c, u, g, unknown or other
  misc_difference 99: note = modified_base - a, c, u, g, unknown or other
  misc_difference 100: note = modified_base - a, c, u, g, unknown or other
  misc_difference 101: note = modified_base - a, c, u, g, unknown or other
  misc_difference 102: note = modified_base - a, c, u, g, unknown or other
  misc_difference 103: note = modified_base - a, c, u, g, unknown or other
  misc_difference 104: note = modified_base - a, c, u, g, unknown or other
  misc_difference 105: note = modified_base - a, c, u, g, unknown or other
  misc_difference 106: note = modified_base - a, c, u, g, unknown or other
  misc_difference 107: note = modified_base - a, c, u, g, unknown or other
  misc_difference 108: note = modified_base - a, c, u, g, unknown or other
  misc_difference 109: note = modified_base - a, c, u, g, unknown or other
  misc_difference 110: note = modified_base - a, c, u, g, unknown or other
  misc_difference 111: note = modified_base - a, c, u, g, unknown or other
  misc_difference 112: note = modified_base - a, c, u, g, unknown or other
  misc_difference 113: note = modified_base - a, c, u, g, unknown or other
  misc_difference 114: note = modified_base - a, c, u, g, unknown or other
  misc_difference 115: note = modified_base - a, c, u, g, unknown or other
  misc_difference 116: note = modified_base - a, c, u, g, unknown or other
ggcgaggttctgtcttttggtcaggacaaccgtctagctataagtgctgcaggggtgagaaactcctagctggacgatgtctcgaggcattagcacnnnnnnnnnnnnnnnnnnnn

SEQ ID NO: 197 - RNA, 120 nt, synthetic construct; identical to SEQ ID NO: 2
  source 1..120: mol_type = other RNA
  modified_base 1: mod_base = OTHER; note = 2'-O-methylguanosine phosphorothioate
  modified_base 2: mod_base = OTHER; note = 2'-O-methyluridine phosphorothioate
  modified_base 3: mod_base = OTHER; note = 2'-O-methyluridine phosphorothioate
  modified_base 5: mod_base = OTHER; note = 2'-O-methyluridine
  modified_base 16: mod_base = OTHER; note = 2'-O-methylcytidine
  modified_base 21: mod_base = OTHER; note = 2'-O-methylcytidine
  modified_base 25: mod_base = OTHER; note = 2'-O-methylcytidine
  modified_base 26: mod_base = OTHER; note = 2'-O-methylguanosine
  modified_base 29: mod_base = OTHER; note = 2'-O-methyluridine
  modified_base 30: mod_base = OTHER; note = 2'-O-methyladenosine
  modified_base 44: mod_base = OTHER; note = 2'-O-methylcytidine
  modified_base 45: mod_base = OTHER; note = 2'-O-methyladenosine
  modified_base 49: mod_base = OTHER; note = 2'-O-methyluridine
  modified_base 50: mod_base = OTHER; note = 2'-O-methylguanosine
  modified_base 62: mod_base = OTHER; note = 2'-O-methyluridine
  modified_base 63: mod_base = OTHER; note = 2'-O-methyladenosine
  modified_base 67: mod_base = OTHER; note = 2'-O-methylcytidine
  modified_base 68: mod_base = OTHER; note = 2'-O-methyluridine
  modified_base 69: mod_base = OTHER; note = 2'-O-methylguanosine
  modified_base 72: mod_base = OTHER; note = 2'-O-methylcytidine
  modified_base 75: mod_base = OTHER; note = 2'-O-methyluridine
  modified_base 76: mod_base = OTHER; note = 2'-O-methylguanosine
  modified_base 79: mod_base = OTHER; note = 2'-O-methyluridine
  modified_base 82: mod_base = OTHER; note = 2'-O-methyluridine
  modified_base 83: mod_base = OTHER; note = 2'-O-methyladenosine
  modified_base 84: mod_base = OTHER; note = 2'-O-methylcytidine
  modified_base 117: mod_base = OTHER; note = 2'-O-methyluridine phosphorothioate
  modified_base 118: mod_base = OTHER; note = 2'-O-methyladenosine phosphorothioate
  modified_base 119: mod_base = OTHER; note = 2'-O-methyladenosine phosphorothioate
  modified_base 120: mod_base = OTHER; note = 2'-O-methyladenosine

SEQ ID NO: 198 - RNA, 120 nt, synthetic construct; identical to SEQ ID NO: 2
  source 1..120: mol_type = other RNA
  modified_base 1: mod_base = OTHER; note = 2'-O-methylguanosine phosphorothioate
  modified_base 2: mod_base = OTHER; note = 2'-O-methyluridine phosphorothioate
  modified_base 3: mod_base = OTHER; note = 2'-O-methyluridine phosphorothioate
  modified_base 5: mod_base = OTHER; note = 2'-O-methyluridine
  modified_base 16: mod_base = OTHER; note = 2'-O-methylcytidine
  modified_base 21: mod_base = OTHER; note = 2'-O-methylcytidine
  modified_base 25: mod_base = OTHER; note = 2'-O-methylcytidine
  modified_base 26: mod_base = OTHER; note = 2'-O-methylguanosine
  modified_base 29: mod_base = OTHER; note = 2'-O-methyluridine
  modified_base 30: mod_base = OTHER; note = 2'-O-methyladenosine
  modified_base 33: mod_base = OTHER; note = 2'-O-methyluridine
  modified_base 35: mod_base = OTHER; note = 2'-O-methyluridine
  modified_base 37: mod_base = OTHER; note = 2'-O-methyladenosine
  modified_base 39: mod_base = OTHER; note = 2'-O-methyluridine
  modified_base 44: mod_base = OTHER; note = 2'-O-methylcytidine
  modified_base 45: mod_base = OTHER; note = 2'-O-methyladenosine
  modified_base 47: mod_base = OTHER; note = 2'-O-methylguanosine
  modified_base 49: mod_base = OTHER; note = 2'-O-methyluridine
  modified_base 50: mod_base = OTHER; note = 2'-O-methylguanosine
  modified_base 51: mod_base = OTHER; note = 2'-O-methyluridine
  modified_base 62: mod_base = OTHER; note = 2'-O-methyluridine
  modified_base 63: mod_base = OTHER; note = 2'-O-methyladenosine
  modified_base 65: mod_base = OTHER; note = 2'-O-methyluridine
  modified_base 67: mod_base = OTHER; note = 2'-O-methylcytidine
  modified_base 68: mod_base = OTHER; note = 2'-O-methyluridine
  modified_base 69: mod_base = OTHER; note = 2'-O-methylguanosine
  modified_base 72: mod_base = OTHER; note = 2'-O-methylcytidine
  modified_base 75: mod_base = OTHER; note = 2'-O-methyluridine
  modified_base 76: mod_base = OTHER; note = 2'-O-methylguanosine
  modified_base 79: mod_base = OTHER; note = 2'-O-methyluridine
  modified_base 82: mod_base = OTHER; note = 2'-O-methyluridine
  modified_base 83: mod_base = OTHER; note = 2'-O-methyladenosine
  modified_base 84: mod_base = OTHER; note = 2'-O-methylcytidine
  modified_base 86: mod_base = OTHER; note = 2'-O-methyladenosine
  modified_base 87: mod_base = OTHER; note = 2'-O-methylguanosine
  modified_base 89: mod_base = OTHER; note = 2'-O-methylcytidine
  modified_base 92: mod_base = OTHER; note = 2'-O-methyluridine
  modified_base 95: mod_base = OTHER; note = 2'-O-methylcytidine
  modified_base 117: mod_base = OTHER; note = 2'-O-methyluridine phosphorothioate
  modified_base 118: mod_base = OTHER; note = 2'-O-methyladenosine phosphorothioate
  modified_base 119: mod_base = OTHER; note = 2'-O-methyladenosine phosphorothioate
  modified_base 120: mod_base = OTHER; note = 2'-O-methyladenosine

SEQ ID NO: 199 - RNA, 120 nt, synthetic construct; identical to SEQ ID NO: 2
  source 1..120: mol_type = other RNA
  modified_base 1: mod_base = OTHER; note = 2'-O-methylguanosine phosphorothioate
  modified_base 2: mod_base = OTHER; note = 2'-O-methyluridine phosphorothioate
  modified_base 3: mod_base = OTHER; note = 2'-O-methyluridine phosphorothioate
  modified_base 109: mod_base = OTHER; note = 2'-O-methyluridine
  modified_base 113: mod_base = OTHER; note = 2'-O-methylcytidine
  modified_base 117: mod_base = OTHER; note = 2'-O-methyluridine phosphorothioate
  modified_base 118: mod_base = OTHER; note = 2'-O-methyladenosine phosphorothioate
  modified_base 119: mod_base = OTHER; note = 2'-O-methyladenosine phosphorothioate
  modified_base 120: mod_base = OTHER; note = 2'-O-methyladenosine

SEQ ID NO: 200 - RNA, 120 nt, synthetic construct; identical to SEQ ID NO: 2
  source 1..120: mol_type = other RNA
  modified_base 1: mod_base = OTHER; note = 2'-O-methylguanosine phosphorothioate
  modified_base 2: mod_base = OTHER; note = 2'-O-methyluridine phosphorothioate
  modified_base 3: mod_base = OTHER; note = 2'-O-methyluridine phosphorothioate
  modified_base 5: mod_base = OTHER; note = 2'-O-methyluridine
  modified_base 16: mod_base = OTHER; note = 2'-O-methylcytidine
  modified_base 21: mod_base = OTHER; note = 2'-O-methylcytidine
  modified_base 25: mod_base = OTHER; note = 2'-O-methylcytidine
  modified_base 26: mod_base = OTHER; note = 2'-O-methylguanosine
  modified_base 29: mod_base = OTHER; note = 2'-O-methyluridine
  modified_base 30: mod_base = OTHER; note = 2'-O-methyladenosine
  modified_base 44: mod_base = OTHER; note = 2'-O-methylcytidine
  modified_base 45: mod_base = OTHER; note = 2'-O-methyladenosine
  modified_base 49: mod_base = OTHER; note = 2'-O-methyluridine
  modified_base 50: mod_base = OTHER; note = 2'-O-methylguanosine
  modified_base 62: mod_base = OTHER; note = 2'-O-methyluridine
  modified_base 63: mod_base = OTHER; note = 2'-O-methyladenosine
  modified_base 67: mod_base = OTHER; note = 2'-O-methylcytidine
  modified_base 68: mod_base = OTHER; note = 2'-O-methyluridine
  modified_base 69: mod_base = OTHER; note = 2'-O-methylguanosine
  modified_base 72: mod_base = OTHER; note = 2'-O-methylcytidine
  modified_base 75: mod_base = OTHER; note = 2'-O-methyluridine
  modified_base 76: mod_base = OTHER; note = 2'-O-methylguanosine
  modified_base 79: mod_base = OTHER; note = 2'-O-methyluridine
  modified_base 82: mod_base = OTHER; note = 2'-O-methyluridine
  modified_base 83: mod_base = OTHER; note = 2'-O-methyladenosine
  modified_base 84: mod_base = OTHER; note = 2'-O-methylcytidine
  modified_base 109: mod_base = OTHER; note = 2'-O-methyluridine
  modified_base 113: mod_base = OTHER; note = 2'-O-methylcytidine
  modified_base 117: mod_base = OTHER; note = 2'-O-methyluridine phosphorothioate
  modified_base 118: mod_base = OTHER; note = 2'-O-methyladenosine phosphorothioate
  modified_base 119: mod_base = OTHER; note = 2'-O-methyladenosine phosphorothioate
  modified_base 120: mod_base = OTHER; note = 2'-O-methyladenosine

SEQ ID NO: 201 - RNA, 120 nt, synthetic construct; identical to SEQ ID NO: 2
  source 1..120: mol_type = other RNA
  modified_base 1: mod_base = OTHER; note = 2'-O-methylguanosine phosphorothioate
  modified_base 2: mod_base = OTHER; note = 2'-O-methyluridine phosphorothioate
  modified_base 3: mod_base = OTHER; note = 2'-O-methyluridine phosphorothioate
  modified_base 5: mod_base = OTHER; note = 2'-O-methyluridine
  modified_base 16: mod_base = OTHER; note = 2'-O-methylcytidine
  modified_base 21: mod_base = OTHER; note = 2'-O-methylcytidine
  modified_base 25: mod_base = OTHER; note = 2'-O-methylcytidine
  modified_base 26: mod_base = OTHER; note = 2'-O-methylguanosine
  modified_base 29: mod_base = OTHER; note = 2'-O-methyluridine
  modified_base 30: mod_base = OTHER; note = 2'-O-methyladenosine
  modified_base 33: mod_base = OTHER; note = 2'-O-methyluridine
  modified_base 35: mod_base = OTHER; note = 2'-O-methyluridine
  modified_base 37: mod_base = OTHER; note = 2'-O-methyladenosine
  modified_base 39: mod_base = OTHER; note = 2'-O-methyluridine
  modified_base 44: mod_base = OTHER; note = 2'-O-methylcytidine
  modified_base 45: mod_base = OTHER; note = 2'-O-methyladenosine
  modified_base 47: mod_base = OTHER; note = 2'-O-methylguanosine
  modified_base 49: mod_base = OTHER; note = 2'-O-methyluridine
  modified_base 50: mod_base = OTHER; note = 2'-O-methylguanosine
  modified_base 51: mod_base = OTHER; note = 2'-O-methyluridine
  modified_base 62: mod_base = OTHER; note = 2'-O-methyluridine
  modified_base 63: mod_base = OTHER; note = 2'-O-methyladenosine
  modified_base 65: mod_base = OTHER; note = 2'-O-methyluridine
  modified_base 67: mod_base = OTHER; note = 2'-O-methylcytidine
  modified_base 68: mod_base = OTHER; note = 2'-O-methyluridine
  modified_base 69: mod_base = OTHER; note = 2'-O-methylguanosine
  modified_base 72: mod_base = OTHER; note = 2'-O-methylcytidine
  modified_base 75: mod_base = OTHER; note = 2'-O-methyluridine
  modified_base 76: mod_base = OTHER; note = 2'-O-methylguanosine
  modified_base 79: mod_base = OTHER; note = 2'-O-methyluridine
  modified_base 82: mod_base = OTHER; note = 2'-O-methyluridine
  modified_base 83: mod_base = OTHER; note = 2'-O-methyladenosine
  modified_base 84: mod_base = OTHER; note = 2'-O-methylcytidine
  modified_base 86: mod_base = OTHER; note = 2'-O-methyladenosine
  modified_base 87: mod_base = OTHER; note = 2'-O-methylguanosine
  modified_base 89: mod_base = OTHER; note = 2'-O-methylcytidine
  modified_base 92: mod_base = OTHER; note = 2'-O-methyluridine
  modified_base 95: mod_base = OTHER; note = 2'-O-methylcytidine
  modified_base 109: mod_base = OTHER; note = 2'-O-methyluridine
  modified_base 113: mod_base = OTHER; note = 2'-O-methylcytidine
  modified_base 117: mod_base = OTHER; note = 2'-O-methyluridine phosphorothioate
  modified_base 118: mod_base = OTHER; note = 2'-O-methyladenosine phosphorothioate
  modified_base 119: mod_base = OTHER; note = 2'-O-methyladenosine phosphorothioate
  modified_base 120: mod_base = OTHER; note = 2'-O-methyladenosine

SEQ ID NO: 202 - RNA, 120 nt, synthetic construct; identical to SEQ ID NO: 2
  source 1..120: mol_type = other RNA
  modified_base 1: mod_base = OTHER; note = 2'-O-methylguanosine phosphorothioate
  modified_base 2: mod_base = OTHER; note = 2'-O-methyluridine phosphorothioate
  modified_base 3: mod_base = OTHER; note = 2'-O-methyluridine phosphorothioate
  modified_base 4: mod_base = OTHER; note = 2'-O-methylcytidine
  modified_base 5: mod_base = OTHER; note = 2'-O-methyluridine
  modified_base 6: mod_base = OTHER; note = 2'-O-methylguanosine
  modified_base 7: mod_base = OTHER; note = 2'-O-methyluridine
  modified_base 11: mod_base = OTHER; note = 2'-O-methyluridine
  modified_base 16: mod_base = OTHER; note = 2'-O-methylcytidine
  modified_base 17: mod_base = OTHER; note = 2'-O-methyladenosine
  modified_base 18: mod_base = OTHER; note = 2'-O-methylguanosine
  modified_base 19: mod_base = OTHER; note = 2'-O-methylguanosine
  modified_base 20: mod_base = OTHER; note = 2'-O-methyladenosine
  modified_base 21: mod_base = OTHER; note = 2'-O-methylcytidine
  modified_base 25: mod_base = OTHER; note = 2'-O-methylcytidine
  modified_base 26: mod_base = OTHER; note = 2'-O-methylguanosine
  modified_base 27: mod_base = OTHER; note = 2'-O-methyluridine
  modified_base 28: mod_base = OTHER; note = 2'-O-methylcytidine
  modified_base 29: mod_base = OTHER; note = 2'-O-methyluridine
  modified_base 30: mod_base = OTHER; note = 2'-O-methyladenosine
  modified_base 31: mod_base = OTHER; note = 2'-O-methylguanosine
  modified_base 39: mod_base = OTHER; note = 2'-O-methyluridine
  modified_base 42: mod_base = OTHER; note = 2'-O-methyluridine
  modified_base 45: mod_base = OTHER; note = 2'-O-methyladenosine
  modified_base 46: mod_base = OTHER; note = 2'-O-methylguanosine
  modified_base 47: mod_base = OTHER; note = 2'-O-methylguanosine
  modified_base 48: mod_base = OTHER; note = 2'-O-methylguanosine
  modified_base 49: mod_base = OTHER; note = 2'-O-methyluridine
  modified_base 50: mod_base = OTHER; note = 2'-O-methylguanosine
  modified_base 51: mod_base = OTHER; note = 2'-O-methyluridine
  modified_base 52: mod_base = OTHER; note = 2'-O-methylguanosine
  modified_base 57: mod_base = OTHER; note = 2'-O-methyladenosine
  modified_base 58: mod_base = OTHER; note = 2'-O-methylcytidine
  modified_base 59: mod_base = OTHER; note = 2'-O-methyluridine
  modified_base 60: mod_base = OTHER; note = 2'-O-methylcytidine
  modified_base 61: mod_base = OTHER; note = 2'-O-methylcytidine
  modified_base 62: mod_base = OTHER; note = 2'-O-methyluridine
  modified_base 64: mod_base = OTHER; note = 2'-O-methyluridine
  modified_base 65: mod_base = OTHER; note = 2'-O-methyluridine
  modified_base 70: mod_base = OTHER; note = 2'-O-methylguanosine
  modified_base 71: mod_base = OTHER; note = 2'-O-methyladenosine
  modified_base 72: mod_base = OTHER; note = 2'-O-methylcytidine
  modified_base 73: mod_base = OTHER; note = 2'-O-methylguanosine
  modified_base 74: mod_base = OTHER; note = 2'-O-methyladenosine
  modified_base 75: mod_base = OTHER; note = 2'-O-methyluridine
  modified_base 76: mod_base = OTHER; note = 2'-O-methylguanosine
  modified_base 77: mod_base = OTHER; note = 2'-O-methyluridine
  modified_base 78: mod_base = OTHER; note = 2'-O-methylcytidine
  modified_base 79: mod_base = OTHER; note = 2'-O-methyluridine
  modified_base 80: mod_base = OTHER; note = 2'-O-methylcytidine
  modified_base 81: mod_base = OTHER; note = 2'-O-methyluridine
  modified_base 82: mod_base = OTHER; note = 2'-O-methyluridine
  modified_base 83: mod_base = OTHER; note = 2'-O-methyladenosine
  modified_base 84: mod_base = OTHER; note = 2'-O-methylcytidine
  modified_base 85: mod_base = OTHER; note = 2'-O-methylguanosine
  modified_base 86: mod_base = OTHER; note = 2'-O-methyladenosine
  modified_base 87: mod_base = OTHER; note = 2'-O-methylguanosine
  modified_base 117: mod_base = OTHER; note = 2'-O-methyluridine phosphorothioate
  modified_base 118: mod_base = OTHER; note = 2'-O-methyladenosine phosphorothioate
  modified_base 119: mod_base = OTHER; note = 2'-O-methyladenosine phosphorothioate
  modified_base 120: mod_base = OTHER; note = 2'-O-methyladenosine

SEQ ID NO: 203 - RNA, 120 nt, synthetic construct; identical to SEQ ID NO: 2
  source 1..120: mol_type = other RNA
  modified_base 1: mod_base = OTHER; note = 2'-O-methylguanosine phosphorothioate
  modified_base 2: mod_base = OTHER; note = 2'-O-methyluridine phosphorothioate
  modified_base 3: mod_base = OTHER; note = 2'-O-methyluridine phosphorothioate
  modified_base 4: mod_base = OTHER; note = 2'-O-methylcytidine
  modified_base 5: mod_base = OTHER; note = 2'-O-methyluridine
  modified_base 6: mod_base = OTHER; note = 2'-O-methylguanosine
  modified_base 7: mod_base = OTHER; note = 2'-O-methyluridine
  modified_base 11: mod_base = OTHER; note = 2'-O-methyluridine
  modified_base 16: mod_base = OTHER; note = 2'-O-methylcytidine
  modified_base 17: mod_base = OTHER; note = 2'-O-methyladenosine
  modified_base 18: mod_base = OTHER; note = 2'-O-methylguanosine
  modified_base 19: mod_base = OTHER; note = 2'-O-methylguanosine
  modified_base 20: mod_base = OTHER; note = 2'-O-methyladenosine
  modified_base 21: mod_base = OTHER; note = 2'-O-methylcytidine
  modified_base 25: mod_base = OTHER; note = 2'-O-methylcytidine
  modified_base 26: mod_base = OTHER; note = 2'-O-methylguanosine
  modified_base 27: mod_base = OTHER; note = 2'-O-methyluridine
  modified_base 28: mod_base = OTHER; note = 2'-O-methylcytidine
  modified_base 29: mod_base = OTHER; note = 2'-O-methyluridine
  modified_base 30: mod_base = OTHER; note = 2'-O-methyladenosine
  modified_base 31: mod_base = OTHER; note = 2'-O-methylguanosine
  modified_base 45: mod_base = OTHER; note = 2'-O-methyladenosine
  modified_base 46: mod_base = OTHER; note = 2'-O-methylguanosine
  modified_base 47: mod_base = OTHER; note = 2'-O-methylguanosine
  modified_base 48: mod_base = OTHER; note = 2'-O-methylguanosine
  modified_base 49: mod_base = OTHER; note = 2'-O-methyluridine
  modified_base 50: mod_base = OTHER; note = 2'-O-methylguanosine
  modified_base 51: mod_base = OTHER; note = 2'-O-methyluridine
  modified_base 52: mod_base = OTHER; note = 2'-O-methylguanosine
  modified_base 57: mod_base = OTHER; note = 2'-O-methyladenosine
  modified_base 58: mod_base = OTHER; note = 2'-O-methylcytidine
  modified_base 59: mod_base = OTHER; note = 2'-O-methyluridine
  modified_base 60: mod_base = OTHER; note = 2'-O-methylcytidine
  modified_base 61: mod_base = OTHER; note = 2'-O-methylcytidine
  modified_base 62: mod_base = OTHER; note = 2'-O-methyluridine
  modified_base 64: mod_base = OTHER; note = 2'-O-methyluridine
  modified_base 65: mod_base = OTHER; note = 2'-O-methyluridine
  modified_base 70: mod_base = OTHER; note = 2'-O-methylguanosine
  modified_base 71: mod_base = OTHER; note = 2'-O-methyladenosine
  modified_base 72: mod_base = OTHER; note = 2'-O-methylcytidine
  modified_base 73: mod_base = OTHER; note = 2'-O-methylguanosine
  modified_base 74: mod_base = OTHER; note = 2'-O-methyladenosine
  modified_base 75: mod_base = OTHER; note = 2'-O-methyluridine
  modified_base 76: mod_base = OTHER; note = 2'-O-methylguanosine
  modified_base 77: mod_base = OTHER; note = 2'-O-methyluridine
  modified_base 78: mod_base = OTHER; note = 2'-O-methylcytidine
  modified_base 79: mod_base = OTHER; note = 2'-O-methyluridine
  modified_base 80: mod_base = OTHER; note = 2'-O-methylcytidine
  modified_base 81: mod_base = OTHER; note = 2'-O-methyluridine
  modified_base 82: mod_base = OTHER; note = 2'-O-methyluridine
  modified_base 83: mod_base = OTHER; note = 2'-O-methyladenosine
  modified_base 84: mod_base = OTHER; note = 2'-O-methylcytidine
  modified_base 85: mod_base = OTHER; note = 2'-O-methylguanosine
  modified_base 86: mod_base = OTHER; note = 2'-O-methyladenosine
  modified_base 87: mod_base = OTHER; note = 2'-O-methylguanosine
  modified_base 117: mod_base = OTHER; note = 2'-O-methyluridine phosphorothioate
  modified_base 118: mod_base = OTHER; note = 2'-O-methyladenosine phosphorothioate
  modified_base 119: mod_base = OTHER; note = 2'-O-methyladenosine phosphorothioate
  modified_base 120: mod_base = OTHER; note = 2'-O-methyladenosine

SEQ ID NO: 204 - RNA, 120 nt, synthetic construct; identical to SEQ ID NO: 2
  source 1..120: mol_type = other RNA
  modified_base 1: mod_base = OTHER; note = 2'-O-methylguanosine phosphorothioate
  modified_base 2: mod_base = OTHER; note = 2'-O-methyluridine phosphorothioate
  modified_base 3: mod_base = OTHER; note = 2'-O-methyluridine phosphorothioate
  modified_base 25: mod_base = OTHER; note = 2'-O-methylcytidine
  modified_base 26: mod_base = OTHER; note = 2'-O-methylguanosine
  modified_base 27: mod_base = OTHER; note = 2'-O-methyluridine
  modified_base 28: mod_base = OTHER; note = 2'-O-methylcytidine
  modified_base 29: mod_base = OTHER; note = 2'-O-methyluridine
  modified_base 30: mod_base = OTHER; note = 2'-O-methyladenosine
  modified_base 31: mod_base = OTHER; note = 2'-O-methylguanosine
  modified_base 39: mod_base = OTHER; note = 2'-O-methyluridine
  modified_base 42: mod_base = OTHER; note = 2'-O-methyluridine
  modified_base 45: mod_base = OTHER; note = 2'-O-methyladenosine
  modified_base 46: mod_base = OTHER; note = 2'-O-methylguanosine
  modified_base 47: mod_base = OTHER; note = 2'-O-methylguanosine
  modified_base 48: mod_base = OTHER; note = 2'-O-methylguanosine
  modified_base 49: mod_base = OTHER; note = 2'-O-methyluridine
  modified_base 50: mod_base = OTHER; note = 2'-O-methylguanosine
  modified_base 51: mod_base = OTHER; note = 2'-O-methyluridine
  modified_base 52: mod_base = OTHER; note = 2'-O-methylguanosine
  modified_base 57: mod_base = OTHER; note = 2'-O-methyladenosine
  modified_base 58: mod_base = OTHER; note = 2'-O-methylcytidine
  modified_base 59: mod_base = OTHER; note = 2'-O-methyluridine
  modified_base 60: mod_base = OTHER; note = 2'-O-methylcytidine
  modified_base 61: mod_base = OTHER; note = 2'-O-methylcytidine
  modified_base 62: mod_base = OTHER; note = 2'-O-methyluridine
  modified_base 64: mod_base = OTHER; note = 2'-O-methyluridine
  modified_base 65: mod_base = OTHER; note = 2'-O-methyluridine
  modified_base 70: mod_base = OTHER; note = 2'-O-methylguanosine
  modified_base 71: mod_base = OTHER; note = 2'-O-methyladenosine
  modified_base 72: mod_base = OTHER; note = 2'-O-methylcytidine
  modified_base 73: mod_base = OTHER; note = 2'-O-methylguanosine
  modified_base 74: mod_base = OTHER; note = 2'-O-methyladenosine
  modified_base 75: mod_base = OTHER; note = 2'-O-methyluridine
  modified_base 76: mod_base = OTHER; note = 2'-O-methylguanosine
  modified_base 77: mod_base = OTHER; note = 2'-O-methyluridine
  modified_base 78: mod_base = OTHER; note = 2'-O-methylcytidine
  modified_base 79: mod_base = OTHER; note = 2'-O-methyluridine
  modified_base 80: mod_base = OTHER; note = 2'-O-methylcytidine
  modified_base 81: mod_base = OTHER; note = 2'-O-methyluridine
  modified_base 82: mod_base = OTHER; note = 2'-O-methyluridine
  modified_base 83: mod_base = OTHER; note = 2'-O-methyladenosine
  modified_base 84: mod_base = OTHER; note = 2'-O-methylcytidine
  modified_base 85: mod_base = OTHER; note = 2'-O-methylguanosine
  modified_base 86: mod_base = OTHER; note = 2'-O-methyladenosine
  modified_base 87: mod_base = OTHER; note = 2'-O-methylguanosine
  modified_base 117: mod_base = OTHER; note = 2'-O-methyluridine phosphorothioate
  modified_base 118: mod_base = OTHER; note = 2'-O-methyladenosine phosphorothioate
  modified_base 119: mod_base = OTHER; note = 2'-O-methyladenosine phosphorothioate
  modified_base 120: mod_base = OTHER; note = 2'-O-methyladenosine

SEQ ID NO: 205 - RNA, 120 nt, synthetic construct; identical to SEQ ID NO: 2
  source 1..120: mol_type = other RNA
  modified_base 1: mod_base = OTHER; note = 2'-O-methylguanosine phosphorothioate
  modified_base 2: mod_base = OTHER; note = 2'-O-methyluridine phosphorothioate
  modified_base 3: mod_base = OTHER; note = 2'-O-methyluridine phosphorothioate
  modified_base 4: mod_base = OTHER; note = 2'-O-methylcytidine
  modified_base 5: mod_base = OTHER; note = 2'-O-methyluridine
  modified_base 6: mod_base = OTHER; note = 2'-O-methylguanosine
  modified_base 7: mod_base = OTHER; note = 2'-O-methyluridine
  modified_base 11: mod_base = OTHER; note = 2'-O-methyluridine
  modified_base 16: mod_base = OTHER; note = 2'-O-methylcytidine
  modified_base 17: mod_base = OTHER; note = 2'-O-methyladenosine
  modified_base 18: mod_base = OTHER; note = 2'-O-methylguanosine
  modified_base 19: mod_base = OTHER; note = 2'-O-methylguanosine
  modified_base 20: mod_base = OTHER; note = 2'-O-methyladenosine
  modified_base 21: mod_base = OTHER; note = 2'-O-methylcytidine
  modified_base 25: mod_base = OTHER; note = 2'-O-methylcytidine
  modified_base 26: mod_base = OTHER; note = 2'-O-methylguanosine
  modified_base 27: mod_base = OTHER; note = 2'-O-methyluridine
  modified_base 28: mod_base = OTHER; note = 2'-O-methylcytidine
  modified_base 29: mod_base = OTHER; note = 2'-O-methyluridine
  modified_base 30: mod_base = OTHER; note = 2'-O-methyladenosine
  modified_base 31: mod_base = OTHER; note = 2'-O-methylguanosine
  modified_base 39: mod_base = OTHER; note = 2'-O-methyluridine
  modified_base 42: mod_base = OTHER; note = 2'-O-methyluridine
  modified_base 64: mod_base = OTHER; note = 2'-O-methyluridine
  modified_base 65: mod_base = OTHER; note = 2'-O-methyluridine
  modified_base 70: mod_base = OTHER; note = 2'-O-methylguanosine
  modified_base 71: mod_base = OTHER; note = 2'-O-methyladenosine
  modified_base 72: mod_base = OTHER; note = 2'-O-methylcytidine
  modified_base 73: mod_base = OTHER; note = 2'-O-methylguanosine
  modified_base 74: mod_base = OTHER; note = 2'-O-methyladenosine
  modified_base 75: mod_base = OTHER; note = 2'-O-methyluridine
  modified_base 76: mod_base = OTHER; note = 2'-O-methylguanosine
  modified_base 77: mod_base = OTHER; note = 2'-O-methyluridine
  modified_base 78: mod_base = OTHER; note = 2'-O-methylcytidine
  modified_base 79: mod_base = OTHER; note = 2'-O-methyluridine
  modified_base 80: mod_base = OTHER; note = 2'-O-methylcytidine
  modified_base 81: mod_base = OTHER; note = 2'-O-methyluridine
  modified_base 82: mod_base = OTHER; note = 2'-O-methyluridine
  modified_base 83: mod_base = OTHER; note = 2'-O-methyladenosine
  modified_base 84: mod_base = OTHER; note = 2'-O-methylcytidine
  modified_base 85: mod_base = OTHER; note = 2'-O-methylguanosine
  modified_base 86: mod_base = OTHER; note = 2'-O-methyladenosine
  modified_base 87: mod_base = OTHER; note = 2'-O-methylguanosine
  modified_base 117: mod_base = OTHER; note = 2'-O-methyluridine phosphorothioate
  modified_base 118: mod_base = OTHER; note = 2'-O-methyladenosine phosphorothioate
  modified_base 119: mod_base = OTHER; note = 2'-O-methyladenosine phosphorothioate
  modified_base 120: mod_base = OTHER; note = 2'-O-methyladenosine

SEQ ID NO: 206 - RNA, 120 nt, synthetic construct; identical to SEQ ID NO: 2
  source 1..120: mol_type = other RNA
  modified_base 1: mod_base = OTHER; note = 2'-O-methylguanosine phosphorothioate
  modified_base 2: mod_base = OTHER; note = 2'-O-methyluridine phosphorothioate
  modified_base 3: mod_base = OTHER; note = 2'-O-methyluridine phosphorothioate
  modified_base 98: mod_base = OTHER; note = 2'-O-methyladenosine
  modified_base 104: mod_base = OTHER; note = 2'-O-methylcytidine
  modified_base 105: mod_base = OTHER; note = 2'-O-methyladenosine
  modified_base 109: mod_base = OTHER; note = 2'-O-methyluridine
  modified_base 110: mod_base = OTHER; note = 2'-O-methyladenosine
  modified_base 117: mod_base = OTHER; note = 2'-O-methyluridine phosphorothioate
  modified_base 118: mod_base = OTHER; note = 2'-O-methyladenosine phosphorothioate
  modified_base 119: mod_base = OTHER; note = 2'-O-methyladenosine phosphorothioate
  modified_base 120: mod_base = OTHER; note = 2'-O-methyladenosine

SEQ ID NO: 207 - RNA, 120 nt, synthetic construct; identical to SEQ ID NO: 2
  source 1..120: mol_type = other RNA
  modified_base 1: mod_base = OTHER; note = 2'-O-methylguanosine phosphorothioate
  modified_base 2: mod_base = OTHER; note = 2'-O-methyluridine phosphorothioate
  modified_base 3: mod_base = OTHER; note = 2'-O-methyluridine phosphorothioate
  modified_base 4: mod_base = OTHER; note = 2'-O-methylcytidine
  modified_base 5: mod_base = OTHER; note = 2'-O-methyluridine
  modified_base 6: mod_base = OTHER; note = 2'-O-methylguanosine
  modified_base 7: mod_base = OTHER; note = 2'-O-methyluridine
  modified_base 11: mod_base = OTHER; note = 2'-O-methyluridine
  modified_base 16: mod_base = OTHER; note = 2'-O-methylcytidine
  modified_base 17: mod_base = OTHER; note = 2'-O-methyladenosine
  modified_base 18: mod_base = OTHER; note = 2'-O-methylguanosine
  modified_base 19: mod_base = OTHER; note = 2'-O-methylguanosine
  modified_base 20: mod_base = OTHER; note = 2'-O-methyladenosine
  modified_base 21: mod_base = OTHER; note = 2'-O-methylcytidine
  modified_base 25: mod_base = OTHER; note = 2'-O-methylcytidine
  modified_base 26: mod_base = OTHER; note = 2'-O-methylguanosine
  modified_base 27: mod_base = OTHER; note = 2'-O-methyluridine
  modified_base 28: mod_base = OTHER; note = 2'-O-methylcytidine
  modified_base 29: mod_base = OTHER; note = 2'-O-methyluridine
  modified_base 30: mod_base = OTHER; note = 2'-O-methyladenosine
  modified_base 31: mod_base = OTHER; note = 2'-O-methylguanosine
  modified_base 39: mod_base = OTHER; note = 2'-O-methyluridine
  modified_base 42: mod_base = OTHER; note = 2'-O-methyluridine
  modified_base 45: mod_base = OTHER; note = 2'-O-methyladenosine
  modified_base 46: mod_base = OTHER; note = 2'-O-methylguanosine
  modified_base 47: mod_base = OTHER; note = 2'-O-methylguanosine
  modified_base 48: mod_base = OTHER; note = 2'-O-methylguanosine
  modified_base 49: mod_base = OTHER; note = 2'-O-methyluridine
  modified_base 50: mod_base = OTHER; note = 2'-O-methylguanosine
  modified_base 51: mod_base = OTHER; note = 2'-O-methyluridine
  modified_base 52: mod_base = OTHER; note = 2'-O-methylguanosine
  modified_base 57: mod_base = OTHER; note = 2'-O-methyladenosine
  modified_base 58: mod_base = OTHER; note = 2'-O-methylcytidine
  modified_base 59: mod_base = OTHER; note = 2'-O-methyluridine
  modified_base 60: mod_base = OTHER; note = 2'-O-methylcytidine
  modified_base 61: mod_base = OTHER; note = 2'-O-methylcytidine
  modified_base 62: mod_base = OTHER; note = 2'-O-methyluridine
  modified_base 64: mod_base = OTHER; note = 2'-O-methyluridine
  modified_base 65: mod_base = OTHER; note = 2'-O-methyluridine
  modified_base 70: mod_base = OTHER; note = 2'-O-methylguanosine
  modified_base 71: mod_base = OTHER; note = 2'-O-methyladenosine
  modified_base 72: mod_base = OTHER; note = 2'-O-methylcytidine
  modified_base 73: mod_base = OTHER; note = 2'-O-methylguanosine
  modified_base 74: mod_base = OTHER; note = 2'-O-methyladenosine
  modified_base 75: mod_base = OTHER; note = 2'-O-methyluridine
  modified_base 76: mod_base = OTHER; note = 2'-O-methylguanosine
  modified_base 77: mod_base = OTHER; note = 2'-O-methyluridine
  modified_base 78: mod_base = OTHER; note = 2'-O-methylcytidine
  modified_base 79: mod_base = OTHER; note = 2'-O-methyluridine
  modified_base 80: mod_base = OTHER; note = 2'-O-methylcytidine
  modified_base 81: mod_base = OTHER; note = 2'-O-methyluridine
  modified_base 82: mod_base = OTHER; note = 2'-O-methyluridine
  modified_base 83: mod_base = OTHER; note = 2'-O-methyladenosine
  modified_base 84: mod_base = OTHER; note = 2'-O-methylcytidine
  modified_base 85: mod_base = OTHER; note = 2'-O-methylguanosine
  modified_base 86: mod_base = OTHER; note = 2'-O-methyladenosine
  modified_base 87: mod_base = OTHER; note = 2'-O-methylguanosine
  modified_base 98: mod_base = OTHER; note = 2'-O-methyladenosine
  modified_base 104: mod_base = OTHER; note = 2'-O-methylcytidine
  modified_base 105: mod_base = OTHER; note = 2'-O-methyladenosine
  modified_base 109: mod_base = OTHER; note = 2'-O-methyluridine
  modified_base 110: mod_base = OTHER; note = 2'-O-methyladenosine
  modified_base 117: mod_base = OTHER; note = 2'-O-methyluridine phosphorothioate
  modified_base 118: mod_base = OTHER; note = 2'-O-methyladenosine phosphorothioate
  modified_base 119: mod_base = OTHER; note = 2'-O-methyladenosine phosphorothioate
  modified_base 120: mod_base = OTHER; note = 2'-O-methyladenosine

SEQ ID NO: 208 - RNA, 120 nt, synthetic construct; identical to SEQ ID NO: 2
  source 1..120: mol_type = other RNA
  modified_base 1: mod_base = OTHER; note = 2'-O-methylguanosine phosphorothioate
  modified_base 2: mod_base = OTHER; note = 2'-O-methyluridine phosphorothioate
  modified_base 3: mod_base = OTHER; note = 2'-O-methyluridine phosphorothioate
  modified_base 98: mod_base = OTHER; note = 2'-O-methyladenosine
  modified_base 101: mod_base = OTHER; note = 2'-O-methylcytidine
  modified_base 104: mod_base = OTHER; note = 2'-O-methylcytidine
  modified_base 105: mod_base = OTHER; note = 2'-O-methyladenosine
  modified_base 107: mod_base = OTHER; note = 2'-O-methylcytidine
  modified_base 109: mod_base = OTHER; note = 2'-O-methyluridine
  modified_base 110: mod_base = OTHER; note = 2'-O-methyladenosine
  modified_base 117: mod_base = OTHER; note = 2'-O-methyluridine phosphorothioate
  modified_base 118: mod_base = OTHER; note = 2'-O-methyladenosine phosphorothioate
  modified_base 119: mod_base = OTHER; note = 2'-O-methyladenosine phosphorothioate
  modified_base 120: mod_base = OTHER; note = 2'-O-methyladenosine

SEQ ID NO: 209 - RNA, 120 nt, synthetic construct; identical to SEQ ID NO: 2
  source 1..120: mol_type = other RNA
  modified_base 1: mod_base = OTHER; note = 2'-O-methylguanosine phosphorothioate
  modified_base 2: mod_base = OTHER; note = 2'-O-methyluridine phosphorothioate
  modified_base 3: mod_base = OTHER; note = 2'-O-methyluridine phosphorothioate
  modified_base 4: mod_base = OTHER; note = 2'-O-methylcytidine
  modified_base 5: mod_base = OTHER; note = 2'-O-methyluridine
  modified_base 6: mod_base = OTHER; note = 2'-O-methylguanosine
  modified_base 7: mod_base = OTHER; note = 2'-O-methyluridine
  modified_base 11: mod_base = OTHER; note = 2'-O-methyluridine
  modified_base 16: mod_base = OTHER; note = 2'-O-methylcytidine
  modified_base 17: mod_base = OTHER; note = 2'-O-methyladenosine
  modified_base 18: mod_base = OTHER; note = 2'-O-methylguanosine
  modified_base 19: mod_base = OTHER; note = 2'-O-methylguanosine
  modified_base 20: mod_base = OTHER; note = 2'-O-methyladenosine
  modified_base 21: mod_base = OTHER; note = 2'-O-methylcytidine
  modified_base 25: mod_base = OTHER; note = 2'-O-methylcytidine
  modified_base 26: mod_base = OTHER; note = 2'-O-methylguanosine
  modified_base 27: mod_base = OTHER; note = 2'-O-methyluridine
  modified_base 28: mod_base = OTHER; note = 2'-O-methylcytidine
  modified_base 29: mod_base = OTHER; note = 2'-O-methyluridine
  modified_base 30: mod_base = OTHER; note = 2'-O-methyladenosine
  modified_base 31: mod_base = OTHER; note = 2'-O-methylguanosine
  modified_base 33: mod_base = OTHER; note = 2'-O-methyluridine
  modified_base 39: mod_base = OTHER; note = 2'-O-methyluridine
  modified_base 42: mod_base = OTHER; note = 2'-O-methyluridine
  modified_base 45: mod_base = OTHER; note = 2'-O-methyladenosine
  modified_base 46: mod_base = OTHER; note = 2'-O-methylguanosine
  modified_base 47: mod_base = OTHER; note = 2'-O-methylguanosine
  modified_base 48: mod_base = OTHER; note = 2'-O-methylguanosine
  modified_base 49: mod_base = OTHER; note = 2'-O-methyluridine
  modified_base 50: mod_base = OTHER; note = 2'-O-methylguanosine
  modified_base 51: mod_base = OTHER; note = 2'-O-methyluridine
  modified_base 52: mod_base = OTHER; note = 2'-O-methylguanosine
  modified_base 57: mod_base = OTHER; note = 2'-O-methyladenosine
  modified_base 58: mod_base = OTHER; note = 2'-O-methylcytidine
  modified_base 59: mod_base = OTHER; note = 2'-O-methyluridine
  modified_base 60: mod_base = OTHER; note = 2'-O-methylcytidine
  modified_base 61: mod_base = OTHER; note = 2'-O-methylcytidine
  modified_base 62: mod_base = OTHER; note = 2'-O-methyluridine
  modified_base 64: mod_base = OTHER; note = 2'-O-methyluridine
  modified_base 65: mod_base = OTHER; note = 2'-O-methyluridine
  modified_base 70: mod_base = OTHER; note = 2'-O-methylguanosine
  modified_base 71: mod_base = OTHER; note = 2'-O-methyladenosine
  modified_base 72: mod_base = OTHER; note = 2'-O-methylcytidine
  modified_base 73: mod_base = OTHER; note = 2'-O-methylguanosine
  modified_base 74: mod_base = OTHER; note = 2'-O-methyladenosine
  modified_base 75: mod_base = OTHER; note = 2'-O-methyluridine
  modified_base 76: mod_base = OTHER; note = 2'-O-methylguanosine
  modified_base 77: mod_base = OTHER; note = 2'-O-methyluridine
  modified_base 78: mod_base = OTHER; note = 2'-O-methylcytidine
  modified_base 79: mod_base = OTHER; note = 2'-O-methyluridine
  modified_base 80: mod_base = OTHER; note = 2'-O-methylcytidine
  modified_base 81: mod_base = OTHER; note = 2'-O-methyluridine
  modified_base 82: mod_base = OTHER; note = 2'-O-methyluridine
  modified_base 83: mod_base = OTHER; note = 2'-O-methyladenosine
  modified_base 84: mod_base = OTHER; note = 2'-O-methylcytidine
  modified_base 85: mod_base = OTHER; note = 2'-O-methylguanosine
  modified_base 86: mod_base = OTHER; note = 2'-O-methyladenosine
  modified_base 87: mod_base = OTHER; note = 2'-O-methylguanosine
  modified_base 89: mod_base = OTHER; note = 2'-O-methylcytidine
  modified_base 98: mod_base = OTHER; note = 2'-O-methyladenosine
  modified_base 101: mod_base = OTHER; note = 2'-O-methylcytidine
  modified_base 104: mod_base = OTHER; note = 2'-O-methylcytidine
  modified_base 105: mod_base = OTHER; note = 2'-O-methyladenosine
  modified_base 107: mod_base = OTHER; note = 2'-O-methylcytidine
  modified_base 109: mod_base = OTHER; note = 2'-O-methyluridine
  modified_base 110: mod_base = OTHER; note = 2'-O-methyladenosine
  modified_base 117: mod_base = OTHER; note = 2'-O-methyluridine phosphorothioate
  modified_base 118: mod_base = OTHER; note = 2'-O-methyladenosine phosphorothioate
  modified_base 119: mod_base = OTHER; note = 2'-O-methyladenosine phosphorothioate
  modified_base 120: mod_base = OTHER; note = 2'-O-methyladenosine

SEQ ID NO: 210 - RNA, 124 nt, synthetic construct; identical to SEQ ID NO: 1
  source 1..124: mol_type = other RNA
  modified_base 1: mod_base = OTHER; note = 2'-O-methylguanosine phosphorothioate
  modified_base 2: mod_base = OTHER; note = 2'-O-methyluridine phosphorothioate
  modified_base 3: mod_base = OTHER; note = 2'-O-methyluridine phosphorothioate
  modified_base 4: mod_base = OTHER; note = 2'-O-methylcytidine
  modified_base 5: mod_base = OTHER; note = 2'-O-methyluridine
  modified_base 6: mod_base = OTHER; note = 2'-O-methylguanosine
  modified_base 7: mod_base = OTHER; note = 2'-O-methyluridine
  modified_base 11: mod_base = OTHER; note = 2'-O-methyluridine
  modified_base 16: mod_base = OTHER; note = 2'-O-methylcytidine
  modified_base 17: mod_base = OTHER; note = 2'-O-methyladenosine
  modified_base 18: mod_base = OTHER; note = 2'-O-methylguanosine
  modified_base 19: mod_base = OTHER; note = 2'-O-methylguanosine
  modified_base 20: mod_base = OTHER; note = 2'-O-methyladenosine
  modified_base 21: mod_base = OTHER; note = 2'-O-methylcytidine
  modified_base 25: mod_base = OTHER; note = 2'-O-methylcytidine
  modified_base 26: mod_base = OTHER; note = 2'-O-methylguanosine
  modified_base 27: mod_base = OTHER; note = 2'-O-methyluridine
  modified_base 28: mod_base = OTHER; note = 2'-O-methylcytidine
  modified_base 29: mod_base = OTHER; note = 2'-O-methyluridine
  modified_base 30: mod_base = OTHER; note = 2'-O-methyladenosine
  modified_base 31: mod_base = OTHER; note = 2'-O-methylguanosine
  modified_base 39: mod_base = OTHER; note = 2'-O-methyluridine
  modified_base 42: mod_base = OTHER; note = 2'-O-methyluridine
  modified_base 45: mod_base = OTHER; note = 2'-O-methyladenosine
  modified_base 46: mod_base = OTHER; note = 2'-O-methylguanosine
  modified_base 47: mod_base = OTHER; note = 2'-O-methylguanosine
  modified_base 48: mod_base = OTHER; note = 2'-O-methylguanosine
  modified_base 49: mod_base = OTHER; note = 2'-O-methyluridine
  modified_base 50: mod_base = OTHER; note = 2'-O-methylguanosine
  modified_base 51: mod_base = OTHER; note = 2'-O-methyluridine
  modified_base 52: mod_base = OTHER; note = 2'-O-methylguanosine
  modified_base 57: mod_base = OTHER; note = 2'-O-methyladenosine
  modified_base 58: mod_base = OTHER; note = 2'-O-methylcytidine
  modified_base 59: mod_base = OTHER; note = 2'-O-methyluridine
  modified_base 60: mod_base = OTHER; note = 2'-O-methylcytidine
  modified_base 61: mod_base = OTHER; note = 2'-O-methylcytidine
  modified_base 62: mod_base = OTHER; note = 2'-O-methyluridine
  modified_base 64: mod_base = OTHER; note = 2'-O-methyluridine
  modified_base 65: mod_base = OTHER; note = 2'-O-methyluridine
  modified_base 70: mod_base = OTHER; note = 2'-O-methylguanosine
  modified_base 71: mod_base = OTHER; note = 2'-O-methyladenosine
  modified_base 72: mod_base = OTHER; note = 2'-O-methylcytidine
  modified_base 73: mod_base = OTHER; note = 2'-O-methylguanosine
  modified_base 74: mod_base = OTHER; note = 2'-O-methyladenosine
  modified_base 75: mod_base = OTHER; note = 2'-O-methyluridine
  modified_base 76: mod_base = OTHER; note = 2'-O-methylguanosine
  modified_base 77: mod_base = OTHER; note = 2'-O-methyluridine
  modified_base 78: mod_base = OTHER; note = 2'-O-methylcytidine
  modified_base 79: mod_base = OTHER; note = 2'-O-methyluridine
  modified_base 80: mod_base = OTHER; note = 2'-O-methylcytidine
  modified_base 81: mod_base = OTHER; note = 2'-O-methyluridine
  modified_base 82: mod_base = OTHER; note = 2'-O-methyluridine
  modified_base 83: mod_base = OTHER; note = 2'-O-methyladenosine
  modified_base 84: mod_base = OTHER; note = 2'-O-methylcytidine
  modified_base 85: mod_base = OTHER; note = 2'-O-methylguanosine
  modified_base 86: mod_base = OTHER; note = 2'-O-methyladenosine
  modified_base 87: mod_base = OTHER; note = 2'-O-methylguanosine
  modified_base 117: mod_base = OTHER; note = 2'-O-methyluridine
  modified_base 121: mod_base = OTHER; note = 2'-O-methyluridine phosphorothioate
  modified_base 122: mod_base = OTHER; note = 2'-O-methyluridine phosphorothioate
  modified_base 123: mod_base = OTHER; note = 2'-O-methyluridine phosphorothioate
  modified_base 124: mod_base = OTHER; note = 2'-O-methyluridine

SEQ ID NO: 211 - RNA, 124 nt, synthetic construct; identical to SEQ ID NO: 1
  source 1..124: mol_type = other RNA
  modified_base 1: mod_base = OTHER; note = 2'-O-methylguanosine phosphorothioate
  modified_base 2: mod_base = OTHER; note = 2'-O-methyluridine phosphorothioate
  modified_base 3: mod_base = OTHER; note = 2'-O-methyluridine phosphorothioate
  modified_base 98: mod_base = OTHER; note = 2'-O-methyladenosine
  modified_base 104: mod_base = OTHER; note = 2'-O-methylcytidine
  modified_base 105: mod_base = OTHER; note = 2'-O-methyladenosine
  modified_base 109: mod_base = OTHER; note = 2'-O-methyluridine
  modified_base 110: mod_base = OTHER; note = 2'-O-methyladenosine
  modified_base 117: mod_base = OTHER; note = 2'-O-methyluridine
  modified_base 118: mod_base = OTHER; note = 2'-O-methyladenosine
  modified_base 119: mod_base = OTHER; note = 2'-O-methyladenosine
  modified_base 120: mod_base = OTHER; note = 2'-O-methyladenosine
  modified_base 121: mod_base = OTHER; note = 2'-O-methyluridine phosphorothioate
  modified_base 122: mod_base = OTHER; note = 2'-O-methyluridine phosphorothioate
  modified_base 123: mod_base = OTHER; note = 2'-O-methyluridine phosphorothioate
  modified_base 124: mod_base = OTHER; note = 2'-O-methyluridine

SEQ ID NO: 212 - RNA, 124 nt, synthetic construct; identical to SEQ ID NO: 1
  source 1..124: mol_type = other RNA
  modified_base 1: mod_base = OTHER; note = 2'-O-methylguanosine phosphorothioate
  modified_base 2: mod_base = OTHER; note = 2'-O-methyluridine phosphorothioate
  modified_base 3: mod_base = OTHER; note = 2'-O-methyluridine phosphorothioate
  modified_base 4: mod_base = OTHER; note = 2'-O-methylcytidine
  modified_base 5: mod_base = OTHER; note = 2'-O-methyluridine
  modified_base 6: mod_base = OTHER; note = 2'-O-methylguanosine
  modified_base 7: mod_base = OTHER; note = 2'-O-methyluridine
  modified_base 11: mod_base = OTHER; note = 2'-O-methyluridine
  modified_base 16: mod_base = OTHER; note = 2'-O-methylcytidine
  modified_base 17: mod_base = OTHER; note = 2'-O-methyladenosine
  modified_base 18: mod_base = OTHER; note = 2'-O-methylguanosine
  modified_base 19: mod_base = OTHER; note = 2'-O-methylguanosine
  modified_base 20: mod_base = OTHER; note = 2'-O-methyladenosine
  modified_base 21: mod_base = OTHER; note = 2'-O-methylcytidine
  modified_base 25: mod_base = OTHER; note = 2'-O-methylcytidine
  modified_base 26: mod_base = OTHER; note = 2'-O-methylguanosine
  modified_base 27: mod_base = OTHER; note = 2'-O-methyluridine
  modified_base 28: mod_base = OTHER; note = 2'-O-methylcytidine
  modified_base 29: mod_base = OTHER; note = 2'-O-methyluridine
  modified_base 30: mod_base = OTHER; note = 2'-O-methyladenosine
  modified_base 31: mod_base = OTHER; note = 2'-O-methylguanosine
  modified_base 39: mod_base = OTHER; note = 2'-O-methyluridine
  modified_base 42: mod_base = OTHER; note = 2'-O-methyluridine
  modified_base 45: mod_base = OTHER; note = 2'-O-methyladenosine
  modified_base 46: mod_base = OTHER; note = 2'-O-methylguanosine
  modified_base 47: mod_base = OTHER; note = 2'-O-methylguanosine
  modified_base 48: mod_base = OTHER; note = 2'-O-methylguanosine
  modified_base 49: mod_base = OTHER; note = 2'-O-methyluridine
  modified_base 50: mod_base = OTHER; note = 2'-O-methylguanosine
  modified_base 51: mod_base = OTHER; note = 2'-O-methyluridine
  modified_base 52: mod_base = OTHER; note = 2'-O-methylguanosine
  modified_base 57: mod_base = OTHER; note = 2'-O-methyladenosine
  modified_base 58: mod_base = OTHER; note = 2'-O-methylcytidine
  modified_base 59: mod_base = OTHER; note = 2'-O-methyluridine
  modified_base 60: mod_base = OTHER; note = 2'-O-methylcytidine
  modified_base 61: mod_base = OTHER; note = 2'-O-methylcytidine
  modified_base 62: mod_base = OTHER; note = 2'-O-methyluridine
  modified_base 64: mod_base = OTHER; note = 2'-O-methyluridine
  modified_base 65: mod_base = OTHER; note = 2'-O-methyluridine
  modified_base 70: mod_base = OTHER; note = 2'-O-methylguanosine
  modified_base 71: mod_base = OTHER; note = 2'-O-methyladenosine
  modified_base 72: mod_base = OTHER; note = 2'-O-methylcytidine
  modified_base 73: mod_base = OTHER; note = 2'-O-methylguanosine
  modified_base 74: mod_base = OTHER; note = 2'-O-methyladenosine
  modified_base 75: mod_base = OTHER; note = 2'-O-methyluridine
  modified_base 76: mod_base = OTHER; note = 2'-O-methylguanosine
  modified_base 77: mod_base = OTHER; note = 2'-O-methyluridine
  modified_base 78: mod_base = OTHER; note = 2'-O-methylcytidine
  modified_base 79: mod_base = OTHER; note = 2'-O-methyluridine
  modified_base 80: mod_base = OTHER; note = 2'-O-methylcytidine
  modified_base 81: mod_base = OTHER; note = 2'-O-methyluridine
  modified_base 82: mod_base = OTHER; note = 2'-O-methyluridine
  modified_base 83: mod_base = OTHER; note = 2'-O-methyladenosine
  modified_base 84: mod_base = OTHER; note = 2'-O-methylcytidine
  modified_base 85: mod_base = OTHER; note = 2'-O-methylguanosine
  modified_base 86: mod_base = OTHER; note = 2'-O-methyladenosine
  modified_base 87: mod_base = OTHER; note = 2'-O-methylguanosine
  modified_base 121: mod_base = OTHER; note = 2'-O-methyluridine phosphorothioate
  modified_base 122: mod_base = OTHER; note = 2'-O-methyluridine phosphorothioate
  modified_base 123: mod_base = OTHER; note = 2'-O-methyluridine phosphorothioate
  modified_base 124: mod_base = OTHER; note = 2'-O-methyluridine

SEQ ID NO: 213 - RNA, 124 nt, synthetic construct; identical to SEQ ID NO: 1
  source 1..124: mol_type = other RNA
  modified_base 1: mod_base = OTHER; note = 2'-O-methylguanosine phosphorothioate
  modified_base 2: mod_base = OTHER; note = 2'-O-methyluridine phosphorothioate
  modified_base 3: mod_base = OTHER; note = 2'-O-methyluridine phosphorothioate
  modified_base 4: mod_base = OTHER; note = 2'-O-methylcytidine
  modified_base 5: mod_base = OTHER; note = 2'-O-methyluridine
  modified_base 6: mod_base = OTHER; note = 2'-O-methylguanosine
  modified_base 7: mod_base = OTHER; note = 2'-O-methyluridine
  modified_base 11: mod_base = OTHER; note = 2'-O-methyluridine
  modified_base 16: mod_base = OTHER; note = 2'-O-methylcytidine
  modified_base 17: mod_base = OTHER; note = 2'-O-methyladenosine
  modified_base 18: mod_base = OTHER; note = 2'-O-methylguanosine
  modified_base 19: mod_base = OTHER; note = 2'-O-methylguanosine
  modified_base 20: mod_base = OTHER; note = 2'-O-methyladenosine
  modified_base 21: mod_base = OTHER; note = 2'-O-methylcytidine
  modified_base 25: mod_base = OTHER; note = 2'-O-methylcytidine
  modified_base 26: mod_base = OTHER; note = 2'-O-methylguanosine
  modified_base 27: mod_base = OTHER; note = 2'-O-methyluridine
  modified_base 28: mod_base = OTHER; note = 2'-O-methylcytidine
  modified_base 29: mod_base = OTHER; note = 2'-O-methyluridine
  modified_base 30: mod_base = OTHER; note = 2'-O-methyladenosine
  modified_base 31: mod_base = OTHER; note = 2'-O-methylguanosine
  modified_base 39: mod_base = OTHER; note = 2'-O-methyluridine
  modified_base 42: mod_base = OTHER; note = 2'-O-methyluridine
  modified_base 45: mod_base = OTHER; note = 2'-O-methyladenosine
  modified_base 46: mod_base = OTHER; note = 2'-O-methylguanosine
  modified_base 47: mod_base = OTHER; note = 2'-O-methylguanosine
  modified_base 48: mod_base = OTHER; note = 2'-O-methylguanosine
  modified_base 49: mod_base = OTHER; note = 2'-O-methyluridine
  modified_base 50: mod_base = OTHER; note = 2'-O-methylguanosine
  modified_base 51: mod_base = OTHER; note = 2'-O-methyluridine
  modified_base 52: mod_base = OTHER; note = 2'-O-methylguanosine
  modified_base 57: mod_base = OTHER; note = 2'-O-methyladenosine
  modified_base 58: mod_base = OTHER; note = 2'-O-methylcytidine
  modified_base 59: mod_base = OTHER; note = 2'-O-methyluridine
  modified_base 60: mod_base = OTHER; note = 2'-O-methylcytidine
  modified_base 61: mod_base = OTHER; note = 2'-O-methylcytidine
  modified_base 62: mod_base = OTHER; note = 2'-O-methyluridine
  modified_base 64: mod_base = OTHER; note = 2'-O-methyluridine
  modified_base 65: mod_base = OTHER; note = 2'-O-methyluridine
  modified_base 70: mod_base = OTHER; note = 2'-O-methylguanosine
  modified_base 71: mod_base = OTHER; note = 2'-O-methyladenosine
  modified_base 72: mod_base = OTHER; note = 2'-O-methylcytidine
  modified_base 73: mod_base = OTHER; note = 2'-O-methylguanosine
  modified_base 74: mod_base = OTHER; note = 2'-O-methyladenosine
  modified_base 75: mod_base = OTHER; note = 2'-O-methyluridine
  modified_base 76: mod_base = OTHER; note = 2'-O-methylguanosine
  modified_base 77: mod_base = OTHER; note = 2'-O-methyluridine
  modified_base 78: mod_base = OTHER; note = 2'-O-methylcytidine
  modified_base 79: mod_base = OTHER; note = 2'-O-methyluridine
  modified_base 80: mod_base = OTHER; note = 2'-O-methylcytidine
  modified_base 81: mod_base = OTHER; note = 2'-O-methyluridine
  modified_base 82: mod_base = OTHER; note = 2'-O-methyluridine
  modified_base 83: mod_base = OTHER; note = 2'-O-methyladenosine
  modified_base 84: mod_base = OTHER; note = 2'-O-methylcytidine
  modified_base 85: mod_base = OTHER; note = 2'-O-methylguanosine
  modified_base 86: mod_base = OTHER; note = 2'-O-methyladenosine
  modified_base 87: mod_base = OTHER; note = 2'-O-methylguanosine
  modified_base 117: mod_base = OTHER; note = 2'-O-methyluridine
  modified_base 118: mod_base = OTHER; note = 2'-O-methyladenosine
  modified_base 119: mod_base = OTHER; note = 2'-O-methyladenosine
  modified_base 120: mod_base = OTHER; note = 2'-O-methyladenosine
  modified_base 121: mod_base = OTHER; note = 2'-O-methyluridine phosphorothioate
  modified_base 122: mod_base = OTHER; note = 2'-O-methyluridine phosphorothioate
  modified_base 123: mod_base = OTHER; note = 2'-O-methyluridine phosphorothioate
  modified_base 124: mod_base = OTHER; note = 2'-O-methyluridine

SEQ ID NO: 214 - RNA, 124 nt, synthetic construct; identical to SEQ ID NO: 1
  source 1..124: mol_type = other RNA
  modified_base 1: mod_base = OTHER; note = 2'-O-methylguanosine phosphorothioate
  modified_base 2: mod_base = OTHER; note = 2'-O-methyluridine phosphorothioate
  modified_base 3: mod_base = OTHER; note = 2'-O-methyluridine phosphorothioate
  modified_base 4: mod_base = OTHER; note = 2'-O-methylcytidine
  modified_base 5: mod_base = OTHER; note = 2'-O-methyluridine
  modified_base 6: mod_base = OTHER; note = 2'-O-methylguanosine
  modified_base 7: mod_base = OTHER; note = 2'-O-methyluridine
  modified_base 11: mod_base = OTHER; note = 2'-O-methyluridine
  modified_base 16: mod_base = OTHER; note = 2'-O-methylcytidine
  modified_base 17: mod_base = OTHER; note = 2'-O-methyladenosine
  modified_base 18: mod_base = OTHER; note = 2'-O-methylguanosine
  modified_base 19: mod_base = OTHER; note = 2'-O-methylguanosine
  modified_base 20: mod_base = OTHER; note = 2'-O-methyladenosine
  modified_base 21: mod_base = OTHER; note = 2'-O-methylcytidine
  modified_base 25: mod_base = OTHER; note = 2'-O-methylcytidine
  modified_base 26: mod_base = OTHER; note = 2'-O-methylguanosine
  modified_base 27: mod_base = OTHER; note = 2'-O-methyluridine
  modified_base 28: mod_base = OTHER; note = 2'-O-methylcytidine
  modified_base 29: mod_base = OTHER; note = 2'-O-methyluridine
  modified_base 30: mod_base = OTHER; note = 2'-O-methyladenosine
  modified_base 31: mod_base = OTHER; note = 2'-O-methylguanosine
  modified_base 39: mod_base = OTHER; note = 2'-O-methyluridine
  modified_base 42: mod_base = OTHER; note = 2'-O-methyluridine
  modified_base 45: mod_base = OTHER; note = 2'-O-methyladenosine
  modified_base 46: mod_base = OTHER; note = 2'-O-methylguanosine
  modified_base 47: mod_base = OTHER; note = 2'-O-methylguanosine
  modified_base 48: mod_base = OTHER; note = 2'-O-methylguanosine
  modified_base 49: mod_base = OTHER; note = 2'-O-methyluridine
  modified_base 50: mod_base = OTHER; note = 2'-O-methylguanosine
  modified_base 51: mod_base = OTHER; note = 2'-O-methyluridine
  modified_base 52: mod_base = OTHER; note = 2'-O-methylguanosine
  modified_base 57: mod_base = OTHER; note = 2'-O-methyladenosine
  modified_base 58: mod_base = OTHER; note = 2'-O-methylcytidine
  modified_base 59: mod_base = OTHER; note = 2'-O-methyluridine
  modified_base 60: mod_base = OTHER; note = 2'-O-methylcytidine
  modified_base 61: mod_base = OTHER; note = 2'-O-methylcytidine
  modified_base 62: mod_base = OTHER; note = 2'-O-methyluridine
  modified_base 64: mod_base = OTHER; note = 2'-O-methyluridine
  modified_base 65: mod_base = OTHER; note = 2'-O-methyluridine
  modified_base 70: mod_base = OTHER; note = 2'-O-methylguanosine
  modified_base 71: mod_base = OTHER; note = 2'-O-methyladenosine
  modified_base 72: mod_base = OTHER; note = 2'-O-methylcytidine
  modified_base 73: mod_base = OTHER; note = 2'-O-methylguanosine
  modified_base 74: mod_base = OTHER; note = 2'-O-methyladenosine
  modified_base 75: mod_base = OTHER; note = 2'-O-methyluridine
  modified_base 76: mod_base = OTHER; note = 2'-O-methylguanosine
  modified_base 77: mod_base = OTHER; note = 2'-O-methyluridine
  modified_base 78: mod_base = OTHER; note = 2'-O-methylcytidine
  modified_base 79: mod_base = OTHER; note = 2'-O-methyluridine
  modified_base 80: mod_base = OTHER; note = 2'-O-methylcytidine
  modified_base 81: mod_base = OTHER; note = 2'-O-methyluridine
  modified_base 82: mod_base = OTHER; note = 2'-O-methyluridine
  modified_base 83: mod_base = OTHER; note = 2'-O-methyladenosine
  modified_base 84: mod_base = OTHER; note = 2'-O-methylcytidine
  modified_base 85: mod_base = OTHER; note = 2'-O-methylguanosine
  modified_base 86: mod_base = OTHER; note = 2'-O-methyladenosine
  modified_base 87: mod_base = OTHER; note = 2'-O-methylguanosine
  modified_base 98: mod_base = OTHER; note = 2'-O-methyladenosine
  modified_base 104: mod_base = OTHER; note = 2'-O-methylcytidine
  modified_base 105: mod_base = OTHER; note = 2'-O-methyladenosine
  modified_base 109: mod_base = OTHER; note = 2'-O-methyluridine
  modified_base 110: mod_base = OTHER; note = 2'-O-methyladenosine
  modified_base 117: mod_base = OTHER; note = 2'-O-methyluridine
  modified_base 118: mod_base = OTHER; note = 2'-O-methyladenosine
  modified_base 119: mod_base = OTHER; note = 2'-O-methyladenosine
  modified_base 120: mod_base = OTHER; note = 2'-O-methyladenosine
  modified_base 121: mod_base = OTHER; note = 2'-O-methyluridine phosphorothioate
  modified_base 122: mod_base = OTHER; note = 2'-O-methyluridine phosphorothioate
  modified_base 123: mod_base = OTHER; note = 2'-O-methyluridine phosphorothioate
  modified_base 124: mod_base = OTHER; note = 2'-O-methyluridine

SEQ ID NO: 215 - RNA, 120 nt, synthetic construct; identical to SEQ ID NO: 5
  source 1..120: mol_type = other RNA
  modified_base 1: mod_base = OTHER; note = 2'-O-methylguanosine phosphorothioate
  modified_base 2: mod_base = OTHER; note = 2'-O-methyluridine phosphorothioate
  modified_base 3: mod_base = OTHER; note = 2'-O-methyluridine phosphorothioate
  modified_base 98: mod_base = OTHER; note = 2'-O-methyladenosine
  modified_base 101: mod_base = OTHER; note = 2'-O-methyluridine
  modified_base 104: mod_base = OTHER; note = 2'-O-methyluridine
  modified_base 105: mod_base = OTHER; note = 2'-O-methylcytidine
  modified_base 108: mod_base = OTHER; note = 2'-O-methyluridine
  modified_base 109: mod_base = OTHER; note = 2'-O-methylguanosine
  modified_base 110: mod_base = OTHER; note = 2'-O-methylguanosine
  modified_base 115: mod_base = OTHER; note = 2'-O-methyluridine
  modified_base 117: mod_base = OTHER; note = 2'-O-methyladenosine phosphorothioate
  modified_base 118: mod_base = OTHER; note = 2'-O-methyluridine phosphorothioate
  modified_base 119: mod_base = OTHER; note = 2'-O-methyluridine phosphorothioate
  modified_base 120: mod_base = OTHER; note = 2'-O-methylcytidine

SEQ ID NO: 216 - RNA, 120 nt, synthetic construct; identical to SEQ ID NO: 5
  source 1..120: mol_type = other RNA
  modified_base 1: mod_base = OTHER; note = 2'-O-methylguanosine phosphorothioate
  modified_base 2: mod_base = OTHER; note = 2'-O-methyluridine phosphorothioate
  modified_base 3: mod_base = OTHER; note = 2'-O-methyluridine phosphorothioate
  modified_base 104: mod_base = OTHER; note = 2'-O-methyluridine
  modified_base 105: mod_base = OTHER; note = 2'-O-methylcytidine
  modified_base 109: mod_base = OTHER; note = 2'-O-methylguanosine
  modified_base 110: mod_base = OTHER; note = 2'-O-methylguanosine
  modified_base 117: mod_base = OTHER; note = 2'-O-methyladenosine phosphorothioate
  modified_base 118: mod_base = OTHER; note = 2'-O-methyluridine phosphorothioate
  modified_base 119: mod_base = OTHER; note = 2'-O-methyluridine phosphorothioate
  modified_base 120: mod_base = OTHER; note = 2'-O-methylcytidine

SEQ ID NO: 217 - RNA, 120 nt, synthetic construct; identical to SEQ ID NO: 5
  source 1..120: mol_type = other RNA
  modified_base 1: mod_base = OTHER; note = 2'-O-methylguanosine phosphorothioate
  modified_base 2: mod_base = OTHER; note = 2'-O-methyluridine phosphorothioate
  modified_base 3: mod_base = OTHER; note = 2'-O-methyluridine phosphorothioate
  modified_base 5: mod_base = OTHER; note = 2'-O-methyluridine
  modified_base 16: mod_base = OTHER; note = 2'-O-methylcytidine
  modified_base 21: mod_base = OTHER; note = 2'-O-methylcytidine
  modified_base 25: mod_base = OTHER; note = 2'-O-methylcytidine
  modified_base 26: mod_base = OTHER; note = 2'-O-methylguanosine
  modified_base 29: mod_base = OTHER; note = 2'-O-methyluridine
  modified_base 30: mod_base = OTHER; note = 2'-O-methyladenosine
  modified_base 44: mod_base = OTHER; note = 2'-O-methylcytidine
  modified_base 45: mod_base = OTHER; note = 2'-O-methyladenosine
  modified_base 49: mod_base = OTHER; note = 2'-O-methyluridine
  modified_base 50: mod_base = OTHER; note = 2'-O-methylguanosine
  modified_base 62: mod_base = OTHER; note = 2'-O-methyluridine
  modified_base 63: mod_base = OTHER; note = 2'-O-methyladenosine
  modified_base 67: mod_base = OTHER; note = 2'-O-methylcytidine
  modified_base 68: mod_base = OTHER; note = 2'-O-methyluridine
  modified_base 69: mod_base = OTHER; note = 2'-O-methylguanosine
  modified_base 72: mod_base = OTHER; note = 2'-O-methylcytidine
  modified_base 75: mod_base = OTHER; note = 2'-O-methyluridine
  modified_base 76: mod_base = OTHER; note = 2'-O-methylguanosine
  modified_base 79: mod_base = OTHER; note = 2'-O-methyluridine
  modified_base 82: mod_base = OTHER; note = 2'-O-methyluridine
  modified_base 83: mod_base = OTHER; note = 2'-O-methyladenosine
  modified_base 84: mod_base = OTHER; note = 2'-O-methylcytidine
  modified_base 117: mod_base = OTHER; note = 2'-O-methyladenosine phosphorothioate
  modified_base 118: mod_base = OTHER; note = 2'-O-methyluridine phosphorothioate
  modified_base 119: mod_base = OTHER; note = 2'-O-methyluridine phosphorothioate
  modified_base 120: mod_base = OTHER; note = 2'-O-methylcytidine

SEQ ID NO: 218 - RNA, 120 nt, synthetic construct; identical to SEQ ID NO: 5
  source 1..120: mol_type = other RNA
  modified_base 1: mod_base = OTHER; note = 2'-O-methylguanosine phosphorothioate
  modified_base 2: mod_base = OTHER; note = 2'-O-methyluridine phosphorothioate
  modified_base 3: mod_base = OTHER; note = 2'-O-methyluridine phosphorothioate
  modified_base 5: mod_base = OTHER; note = 2'-O-methyluridine
  modified_base 16: mod_base = OTHER; note = 2'-O-methylcytidine
  modified_base 21: mod_base = OTHER; note = 2'-O-methylcytidine
  modified_base 25: mod_base = OTHER; note = 2'-O-methylcytidine
  modified_base 26: mod_base = OTHER; note = 2'-O-methylguanosine
  modified_base 29: mod_base = OTHER; note = 2'-O-methyluridine
  modified_base 30: mod_base = OTHER; note = 2'-O-methyladenosine
  modified_base 33: mod_base = OTHER; note = 2'-O-methyluridine
  modified_base 35: mod_base = OTHER; note = 2'-O-methyluridine
  modified_base 37: mod_base = OTHER; note = 2'-O-methyladenosine
  modified_base 39: mod_base = OTHER; note = 2'-O-methyluridine
  modified_base 44: mod_base = OTHER; note = 2'-O-methylcytidine
  modified_base 45: mod_base = OTHER; note = 2'-O-methyladenosine
  modified_base 47: mod_base = OTHER; note = 2'-O-methylguanosine
  modified_base 49: mod_base = OTHER; note = 2'-O-methyluridine
  modified_base 50: mod_base = OTHER; note = 2'-O-methylguanosine
  modified_base 51: mod_base = OTHER; note = 2'-O-methyluridine
  modified_base 62: mod_base = OTHER; note = 2'-O-methyluridine
  modified_base 63: mod_base = OTHER; note = 2'-O-methyladenosine
  modified_base 65: mod_base = OTHER; note = 2'-O-methyluridine
  modified_base 67: mod_base = OTHER; note = 2'-O-methylcytidine
  modified_base 68: mod_base = OTHER; note = 2'-O-methyluridine
  modified_base 69: mod_base = OTHER; note = 2'-O-methylguanosine
  modified_base 72: mod_base = OTHER; note = 2'-O-methylcytidine
  modified_base 75: mod_base = OTHER; note = 2'-O-methyluridine
  modified_base 76: mod_base = OTHER; note = 2'-O-methylguanosine
  modified_base 79: mod_base = OTHER; note = 2'-O-methyluridine
  modified_base 82: mod_base = OTHER; note = 2'-O-methyluridine
  modified_base 83: mod_base = OTHER; note = 2'-O-methyladenosine
  modified_base 84: mod_base = OTHER; note = 2'-O-methylcytidine
  modified_base 86: mod_base = OTHER; note = 2'-O-methyladenosine
  modified_base 87: mod_base = OTHER; note = 2'-O-methylguanosine
  modified_base 89: mod_base = OTHER; note = 2'-O-methylcytidine
  modified_base 92: mod_base = OTHER; note = 2'-O-methyluridine
  modified_base 95: mod_base = OTHER; note = 2'-O-methylcytidine
  modified_base 117: mod_base = OTHER; note = 2'-O-methyladenosine phosphorothioate
  modified_base 118: mod_base = OTHER; note = 2'-O-methyluridine phosphorothioate
  modified_base 119: mod_base = OTHER; note = 2'-O-methyluridine phosphorothioate
  modified_base 120: mod_base = OTHER; note = 2'-O-methylcytidine

SEQ ID NO: 219 - RNA, 120 nt, synthetic construct; identical to SEQ ID NO: 5
  source 1..120: mol_type = other RNA
  modified_base 1: mod_base = OTHER; note = 2'-O-methylguanosine phosphorothioate
  modified_base 2: mod_base = OTHER; note = 2'-O-methyluridine phosphorothioate
  modified_base 3: mod_base = OTHER; note = 2'-O-methyluridine phosphorothioate
  modified_base 4: mod_base = OTHER; note = 2'-O-methylcytidine
  modified_base 5: mod_base = OTHER; note = 2'-O-methyluridine
  modified_base 6: mod_base = OTHER; note = 2'-O-methylguanosine
  modified_base 7: mod_base = OTHER; note = 2'-O-methyluridine
  modified_base 11: mod_base = OTHER; note = 2'-O-methyluridine
  modified_base 16: mod_base = OTHER; note = 2'-O-methylcytidine
  modified_base 17: mod_base = OTHER; note = 2'-O-methyladenosine
  modified_base 18: mod_base = OTHER; note = 2'-O-methylguanosine
  modified_base 19: mod_base = OTHER; note = 2'-O-methylguanosine
  modified_base 20: mod_base = OTHER; note = 2'-O-methyladenosine
  modified_base 21: mod_base = OTHER; note = 2'-O-methylcytidine
  modified_base 25: mod_base = OTHER; note = 2'-O-methylcytidine
  modified_base 26: mod_base = OTHER; note = 2'-O-methylguanosine
  modified_base 27: mod_base = OTHER; note = 2'-O-methyluridine
  modified_base 28: mod_base = OTHER; note = 2'-O-methylcytidine
  modified_base 29: mod_base = OTHER; note = 2'-O-methyluridine
  modified_base 30: mod_base = OTHER; note = 2'-O-methyladenosine
  modified_base 31: mod_base = OTHER; note = 2'-O-methylguanosine
  modified_base 39: mod_base = OTHER; note = 2'-O-methyluridine
  modified_base 42: mod_base = OTHER; note = 2'-O-methyluridine
  modified_base 45: mod_base = OTHER; note = 2'-O-methyladenosine
  modified_base 46: mod_base = OTHER; note = 2'-O-methylguanosine
  modified_base 47: mod_base = OTHER; note = 2'-O-methylguanosine
  modified_base 48: mod_base = OTHER; note = 2'-O-methylguanosine
  modified_base 49: mod_base = OTHER; note = 2'-O-methyluridine
  modified_base 50: mod_base = OTHER; note = 2'-O-methylguanosine
  modified_base 51: mod_base = OTHER; note = 2'-O-methyluridine
  modified_base 52: mod_base = OTHER; note = 2'-O-methylguanosine
  modified_base 57: mod_base = OTHER; note = 2'-O-methyladenosine
  modified_base 58: mod_base = OTHER; note = 2'-O-methylcytidine
  modified_base 59: mod_base = OTHER; note = 2'-O-methyluridine
  modified_base 60: mod_base = OTHER; note = 2'-O-methylcytidine
  modified_base 61: mod_base = OTHER; note = 2'-O-methylcytidine
  modified_base 62: mod_base = OTHER; note = 2'-O-methyluridine
  modified_base 64: mod_base = OTHER; note = 2'-O-methyluridine
  modified_base 65: mod_base = OTHER; note = 2'-O-methyluridine
  modified_base 70: mod_base = OTHER; note = 2'-O-methylguanosine
  modified_base 71: mod_base = OTHER; note = 2'-O-methyladenosine
  modified_base 72: mod_base = OTHER; note = 2'-O-methylcytidine
  modified_base 73: mod_base = OTHER; note = 2'-O-methylguanosine
  modified_base 74: mod_base = OTHER; note = 2'-O-methyladenosine
  modified_base 75: mod_base = OTHER; note = 2'-O-methyluridine
  modified_base 76: mod_base = OTHER; note = 2'-O-methylguanosine
  modified_base 77: mod_base = OTHER; note = 2'-O-methyluridine
  modified_base 78: mod_base = OTHER; note = 2'-O-methylcytidine
  modified_base 79: mod_base = OTHER; note = 2'-O-methyluridine
  modified_base 80: mod_base = OTHER; note = 2'-O-methylcytidine
  modified_base 81: mod_base = OTHER; note = 2'-O-methyluridine
  modified_base 82: mod_base = OTHER; note = 2'-O-methyluridine
  modified_base 83: mod_base = OTHER; note = 2'-O-methyladenosine
  modified_base 84: mod_base = OTHER; note = 2'-O-methylcytidine
  modified_base 85: mod_base = OTHER; note = 2'-O-methylguanosine
  modified_base 86: mod_base = OTHER; note = 2'-O-methyladenosine
  modified_base 87: mod_base = OTHER; note = 2'-O-methylguanosine
  modified_base 117: mod_base = OTHER; note = 2'-O-methyladenosine phosphorothioate
  modified_base 118: mod_base = OTHER; note = 2'-O-methyluridine phosphorothioate
  modified_base 119: mod_base = OTHER; note = 2'-O-methyluridine phosphorothioate
  modified_base 120: mod_base = OTHER; note = 2'-O-methylcytidine

SEQ ID NO: 220 - RNA, 120 nt, synthetic construct; identical to SEQ ID NO: 5
  source 1..120: mol_type = other RNA
  modified_base 1: mod_base = OTHER; note = 2'-O-methylguanosine phosphorothioate
  modified_base 2: mod_base = OTHER; note = 2'-O-methyluridine phosphorothioate
  modified_base 3: mod_base = OTHER; note = 2'-O-methyluridine phosphorothioate
  modified_base 4: mod_base = OTHER; note = 2'-O-methylcytidine
  modified_base 5: mod_base = OTHER; note = 2'-O-methyluridine
  modified_base 6: mod_base = OTHER; note = 2'-O-methylguanosine
  modified_base 7: mod_base = OTHER; note = 2'-O-methyluridine
  modified_base 11: mod_base = OTHER; note = 2'-O-methyluridine
  modified_base 16: mod_base = OTHER; note = 2'-O-methylcytidine
  modified_base 17: mod_base = OTHER; note = 2'-O-methyladenosine
  modified_base 18: mod_base = OTHER; note = 2'-O-methylguanosine
  modified_base 19: mod_base = OTHER; note = 2'-O-methylguanosine
  modified_base 20: mod_base = OTHER; note = 2'-O-methyladenosine
  modified_base 21: mod_base = OTHER; note = 2'-O-methylcytidine
  modified_base 25: mod_base = OTHER; note = 2'-O-methylcytidine
  modified_base 26: mod_base = OTHER; note = 2'-O-methylguanosine
  modified_base 27: mod_base = OTHER; note = 2'-O-methyluridine
  modified_base 28: mod_base = OTHER; note = 2'-O-methylcytidine
  modified_base 29: mod_base = OTHER; note = 2'-O-methyluridine
  modified_base 30: mod_base = OTHER; note = 2'-O-methyladenosine
  modified_base 31: mod_base = OTHER; note = 2'-O-methylguanosine
  modified_base 45: mod_base = OTHER; note = 2'-O-methyladenosine
  modified_base 46: mod_base = OTHER; note = 2'-O-methylguanosine
  modified_base 47: mod_base = OTHER; note = 2'-O-methylguanosine
  modified_base 48: mod_base = OTHER; note = 2'-O-methylguanosine
  modified_base 49: mod_base = OTHER; note = 2'-O-methyluridine
  modified_base 50: mod_base = OTHER; note = 2'-O-methylguanosine
  modified_base 51: mod_base = OTHER; note = 2'-O-methyluridine
  modified_base 52: mod_base = OTHER; note = 2'-O-methylguanosine
  modified_base 57: mod_base = OTHER; note = 2'-O-methyladenosine
  modified_base 58: mod_base = OTHER; note = 2'-O-methylcytidine
  modified_base 59: mod_base = OTHER; note = 2'-O-methyluridine
  modified_base 60: mod_base = OTHER; note = 2'-O-methylcytidine
  modified_base 61: mod_base = OTHER; note = 2'-O-methylcytidine
  modified_base 62: mod_base = OTHER; note = 2'-O-methyluridine
  modified_base 64: mod_base = OTHER; note = 2'-O-methyluridine
  modified_base 65: mod_base = OTHER; note = 2'-O-methyluridine
  modified_base 70: mod_base = OTHER; note = 2'-O-methylguanosine
  modified_base 71: mod_base = OTHER; note = 2'-O-methyladenosine
  modified_base 72: mod_base = OTHER; note = 2'-O-methylcytidine
  modified_base 73: mod_base = OTHER; note = 2'-O-methylguanosine
  modified_base 74: mod_base = OTHER; note = 2'-O-methyladenosine
  modified_base 75: mod_base = OTHER; note = 2'-O-methyluridine
  modified_base 76: mod_base = OTHER; note = 2'-O-methylguanosine
  modified_base 77: mod_base = OTHER; note = 2'-O-methyluridine
  modified_base 78: mod_base = OTHER; note = 2'-O-methylcytidine
  modified_base 79: mod_base = OTHER; note = 2'-O-methyluridine
  modified_base 80: mod_base = OTHER; note = 2'-O-methylcytidine
  modified_base 81: mod_base = OTHER; note = 2'-O-methyluridine
  modified_base 82: mod_base = OTHER; note = 2'-O-methyluridine
  modified_base 83: mod_base = OTHER; note = 2'-O-methyladenosine
  modified_base 84: mod_base = OTHER; note = 2'-O-methylcytidine
  modified_base 85: mod_base = OTHER; note = 2'-O-methylguanosine
  modified_base 86: mod_base = OTHER; note = 2'-O-methyladenosine
  modified_base 87: mod_base = OTHER; note = 2'-O-methylguanosine
  modified_base 117: mod_base = OTHER; note = 2'-O-methyladenosine phosphorothioate
  modified_base 118: mod_base = OTHER; note = 2'-O-methyluridine phosphorothioate
  modified_base 119: mod_base = OTHER; note = 2'-O-methyluridine phosphorothioate
  modified_base 120: mod_base = OTHER; note = 2'-O-methylcytidine

SEQ ID NO: 221 - RNA, 120 nt, synthetic construct; identical to SEQ ID NO: 5
  source 1..120: mol_type = other RNA
  modified_base 1: mod_base = OTHER; note = 2'-O-methylguanosine phosphorothioate
  modified_base 2: mod_base = OTHER; note = 2'-O-methyluridine phosphorothioate
  modified_base 3: mod_base = OTHER; note = 2'-O-methyluridine phosphorothioate
  modified_base 25: mod_base = OTHER; note = 2'-O-methylcytidine
  modified_base 26: mod_base = OTHER; note = 2'-O-methylguanosine
  modified_base 27: mod_base = OTHER; note = 2'-O-methyluridine
  modified_base 28: mod_base = OTHER; note = 2'-O-methylcytidine
  modified_base 29: mod_base = OTHER; note = 2'-O-methyluridine
  modified_base 30: mod_base = OTHER; note = 2'-O-methyladenosine
  modified_base 31: mod_base = OTHER; note = 2'-O-methylguanosine
  modified_base 39: mod_base = OTHER; note = 2'-O-methyluridine
  modified_base 42: mod_base = OTHER; note = 2'-O-methyluridine
  modified_base 45: mod_base = OTHER; note = 2'-O-methyladenosine
  modified_base 46: mod_base = OTHER; note = 2'-O-methylguanosine
  modified_base 47: mod_base = OTHER; note = 2'-O-methylguanosine
  modified_base 48: mod_base = OTHER; note = 2'-O-methylguanosine
  modified_base 49: mod_base = OTHER; note = 2'-O-methyluridine
  modified_base 50: mod_base = OTHER; note = 2'-O-methylguanosine
  modified_base 51: mod_base = OTHER; note = 2'-O-methyluridine
  modified_base 52: mod_base = OTHER; note = 2'-O-methylguanosine
  modified_base 57: mod_base = OTHER; note = 2'-O-methyladenosine
  modified_base 58: mod_base = OTHER; note = 2'-O-methylcytidine
  modified_base 59: mod_base = OTHER; note = 2'-O-methyluridine
  modified_base 60: mod_base = OTHER; note = 2'-O-methylcytidine
  modified_base 61: mod_base = OTHER; note = 2'-O-methylcytidine
  modified_base 62: mod_base = OTHER; note = 2'-O-methyluridine
  modified_base 64: mod_base = OTHER; note = 2'-O-methyluridine
  modified_base 65: mod_base = OTHER; note = 2'-O-methyluridine
  modified_base 70: mod_base = OTHER; note = 2'-O-methylguanosine
  modified_base 71: mod_base = OTHER; note = 2'-O-methyladenosine
  modified_base 72: mod_base = OTHER; note = 2'-O-methylcytidine
  modified_base 73: mod_base = OTHER; note = 2'-O-methylguanosine
  modified_base 74: mod_base = OTHER; note = 2'-O-methyladenosine
  modified_base 75: mod_base = OTHER; note = 2'-O-methyluridine
  modified_base 76: mod_base = OTHER; note = 2'-O-methylguanosine
  modified_base 77: mod_base = OTHER; note = 2'-O-methyluridine
  modified_base 78: mod_base = OTHER; note = 2'-O-methylcytidine
  modified_base 79: mod_base = OTHER; note = 2'-O-methyluridine
  modified_base 80: mod_base = OTHER; note = 2'-O-methylcytidine
  modified_base 81: mod_base = OTHER; note = 2'-O-methyluridine
  modified_base 82: mod_base = OTHER; note = 2'-O-methyluridine
  modified_base 83: mod_base = OTHER; note = 2'-O-methyladenosine
  modified_base 84: mod_base = OTHER; note = 2'-O-methylcytidine
  modified_base 85: mod_base = OTHER; note = 2'-O-methylguanosine
  modified_base 86: mod_base = OTHER; note = 2'-O-methyladenosine
  modified_base 87: mod_base = OTHER; note = 2'-O-methylguanosine
  modified_base 117: mod_base = OTHER; note = 2'-O-methyladenosine phosphorothioate
  modified_base 118: mod_base = OTHER; note = 2'-O-methyluridine phosphorothioate
  modified_base 119: mod_base = OTHER; note = 2'-O-methyluridine phosphorothioate
  modified_base 120: mod_base = OTHER; note = 2'-O-methylcytidine

SEQ ID NO: 222 - RNA, 120 nt, synthetic construct; identical to SEQ ID NO: 5
  source 1..120: mol_type = other RNA
  modified_base 1: mod_base = OTHER; note = 2'-O-methylguanosine phosphorothioate
  modified_base 2: mod_base = OTHER; note = 2'-O-methyluridine phosphorothioate
  modified_base 3: mod_base = OTHER; note = 2'-O-methyluridine phosphorothioate
  modified_base 4: mod_base = OTHER; note = 2'-O-methylcytidine
  modified_base 5: mod_base = OTHER; note = 2'-O-methyluridine
  modified_base 6: mod_base = OTHER; note = 2'-O-methylguanosine
  modified_base 7: mod_base = OTHER; note = 2'-O-methyluridine
  modified_base 11: mod_base = OTHER; note = 2'-O-methyluridine
  modified_base 16: mod_base = OTHER; note = 2'-O-methylcytidine
  modified_base 17: mod_base = OTHER; note = 2'-O-methyladenosine
  modified_base 18: mod_base = OTHER; note = 2'-O-methylguanosine
  modified_base 19: mod_base = OTHER; note = 2'-O-methylguanosine
  modified_base 20: mod_base = OTHER; note = 2'-O-methyladenosine
  modified_base 21: mod_base = OTHER; note = 2'-O-methylcytidine
  modified_base 25: mod_base = OTHER; note = 2'-O-methylcytidine
  modified_base 26: mod_base = OTHER; note = 2'-O-methylguanosine
  modified_base 27: mod_base = OTHER; note = 2'-O-methyluridine
  modified_base 28: mod_base = OTHER; note = 2'-O-methylcytidine
  modified_base 29: mod_base = OTHER; note = 2'-O-methyluridine
  modified_base 30: mod_base = OTHER; note = 2'-O-methyladenosine
  modified_base 31: mod_base = OTHER; note = 2'-O-methylguanosine
  modified_base 39: mod_base = OTHER; note = 2'-O-methyluridine
  modified_base 42: mod_base = OTHER; note = 2'-O-methyluridine
  modified_base 64: mod_base = OTHER; note = 2'-O-methyluridine
  modified_base 65: mod_base = OTHER; note = 2'-O-methyluridine
  modified_base 70: mod_base = OTHER; note = 2'-O-methylguanosine
  modified_base 71: mod_base = OTHER; note = 2'-O-methyladenosine
  modified_base 72: mod_base = OTHER; note = 2'-O-methylcytidine
  modified_base 73: mod_base = OTHER; note = 2'-O-methylguanosine
  modified_base 74: mod_base = OTHER; note = 2'-O-methyladenosine
  modified_base 75: mod_base = OTHER; note = 2'-O-methyluridine
  modified_base 76: mod_base = OTHER; note = 2'-O-methylguanosine
  modified_base 77: mod_base = OTHER; note = 2'-O-methyluridine
  modified_base 78: mod_base = OTHER; note = 2'-O-methylcytidine
  modified_base 79: mod_base = OTHER; note = 2'-O-methyluridine
  modified_base 80: mod_base = OTHER; note = 2'-O-methylcytidine
  modified_base 81: mod_base = OTHER; note = 2'-O-methyluridine
  modified_base 82: mod_base = OTHER; note = 2'-O-methyluridine
  modified_base 83: mod_base = OTHER; note = 2'-O-methyladenosine
  modified_base 84: mod_base = OTHER; note = 2'-O-methylcytidine
  modified_base 85: mod_base = OTHER; note = 2'-O-methylguanosine
  modified_base 86: mod_base = OTHER; note = 2'-O-methyladenosine
  modified_base 87: mod_base = OTHER; note = 2'-O-methylguanosine
  modified_base 117: mod_base = OTHER; note = 2'-O-methyladenosine phosphorothioate
  modified_base 118: mod_base = OTHER; note = 2'-O-methyluridine phosphorothioate
  modified_base 119: mod_base = OTHER; note = 2'-O-methyluridine phosphorothioate
  modified_base 120: mod_base = OTHER; note = 2'-O-methylcytidine

SEQ ID NO: 223 - RNA, 120 nt, synthetic construct; identical to SEQ ID NO: 5
  source 1..120: mol_type = other RNA
  modified_base 1: mod_base = OTHER; note = 2'-O-methylguanosine phosphorothioate
  modified_base 2: mod_base = OTHER; note = 2'-O-methyluridine phosphorothioate
  modified_base 3: mod_base = OTHER; note = 2'-O-methyluridine phosphorothioate
  modified_base 98: mod_base = OTHER; note = 2'-O-methyladenosine
  modified_base 104: mod_base = OTHER; note = 2'-O-methyluridine
  modified_base 105: mod_base = OTHER; note = 2'-O-methylcytidine
  modified_base 109: mod_base = OTHER; note = 2'-O-methylguanosine
  modified_base 110: mod_base = OTHER; note = 2'-O-methylguanosine
  modified_base 117: mod_base = OTHER; note = 2'-O-methyladenosine phosphorothioate
  modified_base 118: mod_base = OTHER; note = 2'-O-methyluridine phosphorothioate
  modified_base 119: mod_base = OTHER; note = 2'-O-methyluridine phosphorothioate
  modified_base 120: mod_base = OTHER; note = 2'-O-methylcytidine

SEQ ID NO: 224 - RNA, 120 nt, synthetic construct; identical to SEQ ID NO: 5
  source 1..120: mol_type = other RNA
  modified_base 1: mod_base = OTHER; note = 2'-O-methylguanosine phosphorothioate
  modified_base 2: mod_base = OTHER; note = 2'-O-methyluridine phosphorothioate
  modified_base 3: mod_base = OTHER; note = 2'-O-methyluridine phosphorothioate
  modified_base 4: mod_base = OTHER; note = 2'-O-methylcytidine
  modified_base 5: mod_base = OTHER; note = 2'-O-methyluridine
  modified_base 6: mod_base = OTHER; note = 2'-O-methylguanosine
  modified_base 7: mod_base = OTHER; note = 2'-O-methyluridine
  modified_base 11: mod_base = OTHER; note = 2'-O-methyluridine
  modified_base 16: mod_base = OTHER; note = 2'-O-methylcytidine
  modified_base 17: mod_base = OTHER; note = 2'-O-methyladenosine
  modified_base 18: mod_base = OTHER; note = 2'-O-methylguanosine
  modified_base 19: mod_base = OTHER; note = 2'-O-methylguanosine
  modified_base 20: mod_base = OTHER; note = 2'-O-methyladenosine
  modified_base 21: mod_base = OTHER; note = 2'-O-methylcytidine
  modified_base 25: mod_base = OTHER; note = 2'-O-methylcytidine
  modified_base 26: mod_base = OTHER; note = 2'-O-methylguanosine
  modified_base 27: mod_base = OTHER; note = 2'-O-methyluridine
  modified_base 28: mod_base = OTHER; note = 2'-O-methylcytidine
  modified_base 29: mod_base = OTHER; note = 2'-O-methyluridine
  modified_base 30: mod_base = OTHER; note = 2'-O-methyladenosine
  modified_base 31: mod_base = OTHER; note = 2'-O-methylguanosine
  modified_base 39: mod_base = OTHER; note = 2'-O-methyluridine
  modified_base 42: mod_base = OTHER; note = 2'-O-methyluridine
  modified_base 45: mod_base = OTHER; note = 2'-O-methyladenosine
  modified_base 46: mod_base = OTHER; note = 2'-O-methylguanosine
  modified_base 47: mod_base = OTHER; note = 2'-O-methylguanosine
  modified_base 48: mod_base = OTHER; note = 2'-O-methylguanosine
  modified_base 49: mod_base = OTHER; note = 2'-O-methyluridine
  modified_base 50: mod_base = OTHER; note = 2'-O-methylguanosine
  modified_base 51: mod_base = OTHER; note = 2'-O-methyluridine
  modified_base 52: mod_base = OTHER; note = 2'-O-methylguanosine
  modified_base 57: mod_base = OTHER; note = 2'-O-methyladenosine
  modified_base 58: mod_base = OTHER; note = 2'-O-methylcytidine
  modified_base 59: mod_base = OTHER; note = 2'-O-methyluridine
  modified_base 60: mod_base = OTHER; note = 2'-O-methylcytidine
  modified_base 61: mod_base = OTHER; note = 2'-O-methylcytidine
  modified_base 62: mod_base = OTHER; note = 2'-O-methyluridine
  modified_base 64: mod_base = OTHER; note = 2'-O-methyluridine
  modified_base 65: mod_base = OTHER; note = 2'-O-methyluridine
  modified_base 70: mod_base = OTHER; note = 2'-O-methylguanosine
  modified_base 71: mod_base = OTHER; note = 2'-O-methyladenosine
  modified_base 72: mod_base = OTHER; note = 2'-O-methylcytidine
  modified_base 73: mod_base = OTHER; note = 2'-O-methylguanosine
  modified_base 74: mod_base = OTHER; note = 2'-O-methyladenosine
  modified_base 75: mod_base = OTHER; note = 2'-O-methyluridine
  modified_base 76: mod_base = OTHER; note = 2'-O-methylguanosine
  modified_base 77: mod_base = OTHER; note = 2'-O-methyluridine
  modified_base 78: mod_base = OTHER; note = 2'-O-methylcytidine
  modified_base 79: mod_base = OTHER; note = 2'-O-methyluridine
  modified_base 80: mod_base = OTHER; note = 2'-O-methylcytidine
  modified_base 81: mod_base = OTHER; note = 2'-O-methyluridine
  modified_base 82: mod_base = OTHER; note = 2'-O-methyluridine
  modified_base 83: mod_base = OTHER; note = 2'-O-methyladenosine
  modified_base 84: mod_base = OTHER; note = 2'-O-methylcytidine
  modified_base 85: mod_base = OTHER; note = 2'-O-methylguanosine
  modified_base 86: mod_base = OTHER; note = 2'-O-methyladenosine
  modified_base 87: mod_base = OTHER; note = 2'-O-methylguanosine
  modified_base 98: mod_base = OTHER; note = 2'-O-methyladenosine
  modified_base 104: mod_base = OTHER; note = 2'-O-methyluridine
  modified_base 105: mod_base = OTHER; note = 2'-O-methylcytidine
  modified_base 109: mod_base = OTHER; note = 2'-O-methylguanosine
  modified_base 110: mod_base = OTHER; note = 2'-O-methylguanosine
  modified_base 117: mod_base = OTHER; note = 2'-O-methyladenosine phosphorothioate
  modified_base 118: mod_base = OTHER; note = 2'-O-methyluridine phosphorothioate
  modified_base 119: mod_base = OTHER; note = 2'-O-methyluridine phosphorothioate
  modified_base 120: mod_base = OTHER; note = 2'-O-methylcytidine

SEQ ID NO: 225 - RNA, 120 nt, synthetic construct; identical to SEQ ID NO: 5
  source 1..120: mol_type = other RNA
  modified_base 1: mod_base = OTHER; note = 2'-O-methylguanosine phosphorothioate
  modified_base 2: mod_base = OTHER; note = 2'-O-methyluridine phosphorothioate
  modified_base 3: mod_base = OTHER; note = 2'-O-methyluridine phosphorothioate
  modified_base 4: mod_base = OTHER; note = 2'-O-methylcytidine
  modified_base 5: mod_base = OTHER; note = 2'-O-methyluridine
  modified_base 6: mod_base = OTHER; note = 2'-O-methylguanosine
  modified_base 7: mod_base = OTHER; note = 2'-O-methyluridine
  modified_base 11: mod_base = OTHER; note = 2'-O-methyluridine
  modified_base 16: mod_base = OTHER; note = 2'-O-methylcytidine
  modified_base 17: mod_base = OTHER; note = 2'-O-methyladenosine
  modified_base 18: mod_base = OTHER; note = 2'-O-methylguanosine
  modified_base 19: mod_base = OTHER; note = 2'-O-methylguanosine
  modified_base 20: mod_base = OTHER; note = 2'-O-methyladenosine
  modified_base 21: mod_base = OTHER; note = 2'-O-methylcytidine
  modified_base 25: mod_base = OTHER; note = 2'-O-methylcytidine
  modified_base 26: mod_base = OTHER; note = 2'-O-methylguanosine
  modified_base 27: mod_base = OTHER; note = 2'-O-methyluridine
  modified_base 28: mod_base = OTHER; note = 2'-O-methylcytidine
  modified_base 29: mod_base = OTHER; note = 2'-O-methyluridine
  modified_base 30: mod_base = OTHER; note = 2'-O-methyladenosine
  modified_base 31: mod_base = OTHER; note = 2'-O-methylguanosine
  modified_base 39: mod_base = OTHER; note = 2'-O-methyluridine
  modified_base 42: mod_base = OTHER; note = 2'-O-methyluridine
  modified_base 45: mod_base = OTHER; note = 2'-O-methyladenosine
  modified_base 46: mod_base = OTHER; note = 2'-O-methylguanosine
  modified_base 47: mod_base = OTHER; note = 2'-O-methylguanosine
  modified_base 48: mod_base = OTHER; note = 2'-O-methylguanosine
  modified_base 49: mod_base = OTHER; note = 2'-O-methyluridine
  modified_base 50: mod_base = OTHER; note = 2'-O-methylguanosine
  modified_base 51: mod_base = OTHER; note = 2'-O-methyluridine
  modified_base 52: mod_base = OTHER; note = 2'-O-methylguanosine
  modified_base 57: mod_base = OTHER; note = 2'-O-methyladenosine
  modified_base 58: mod_base = OTHER; note = 2'-O-methylcytidine
  modified_base 59: mod_base = OTHER; note = 2'-O-methyluridine
  modified_base 60: mod_base = OTHER; note = 2'-O-methylcytidine
  modified_base 61: mod_base = OTHER; note = 2'-O-methylcytidine
  modified_base 62: mod_base = OTHER; note = 2'-O-methyluridine
  modified_base 64: mod_base = OTHER; note = 2'-O-methyluridine
  modified_base 65: mod_base = OTHER; note = 2'-O-methyluridine
  modified_base 70: mod_base = OTHER; note = 2'-O-methylguanosine
  modified_base 71: mod_base = OTHER; note = 2'-O-methyladenosine
  modified_base 72: mod_base = OTHER; note = 2'-O-methylcytidine
  modified_base 73: mod_base = OTHER; note = 2'-O-methylguanosine
  modified_base 74: mod_base = OTHER; note = 2'-O-methyladenosine
  modified_base 75: mod_base = OTHER; note = 2'-O-methyluridine
  modified_base 76: mod_base = OTHER; note = 2'-O-methylguanosine
  modified_base 77: mod_base = OTHER; note = 2'-O-methyluridine
  modified_base 78: mod_base = OTHER; note = 2'-O-methylcytidine
  modified_base 79: mod_base = OTHER; note = 2'-O-methyluridine
  modified_base 80: mod_base = OTHER; note = 2'-O-methylcytidine
  modified_base 81: mod_base = OTHER; note = 2'-O-methyluridine
  modified_base 82: mod_base = OTHER; note = 2'-O-methyluridine
  modified_base 83: mod_base = OTHER; note = 2'-O-methyladenosine
  modified_base 84: mod_base = OTHER; note = 2'-O-methylcytidine
  modified_base 85: mod_base = OTHER; note = 2'-O-methylguanosine
  modified_base 86: mod_base = OTHER; note = 2'-O-methyladenosine
  modified_base 87: mod_base = OTHER; note = 2'-O-methylguanosine
  modified_base 98: mod_base = OTHER; note = 2'-O-methyladenosine
  modified_base 101: mod_base = OTHER; note = 2'-O-methyluridine
  modified_base 104: mod_base = OTHER; note = 2'-O-methyluridine
  modified_base 105: mod_base = OTHER; note = 2'-O-methylcytidine
  modified_base 108: mod_base = OTHER; note = 2'-O-methyluridine
  modified_base 109: mod_base = OTHER; note = 2'-O-methylguanosine
  modified_base 110: mod_base = OTHER; note = 2'-O-methylguanosine
  modified_base 115: mod_base = OTHER; note = 2'-O-methyluridine
  modified_base 117: mod_base = OTHER; note = 2'-O-methyladenosine phosphorothioate
  modified_base 118: mod_base = OTHER; note = 2'-O-methyluridine phosphorothioate
  modified_base 119: mod_base = OTHER; note = 2'-O-methyluridine phosphorothioate
  modified_base 120: mod_base = OTHER; note = 2'-O-methylcytidine

SEQ ID NO: 226 - RNA, 120 nt, synthetic construct; identical to SEQ ID NO: 5
  source 1..120: mol_type = other RNA
  modified_base 1: mod_base = OTHER; note = 2'-O-methylguanosine phosphorothioate
  modified_base 2: mod_base = OTHER; note = 2'-O-methyluridine phosphorothioate
  modified_base 3: mod_base = OTHER; note = 2'-O-methyluridine phosphorothioate
  modified_base 4: mod_base = OTHER; note = 2'-O-methylcytidine
  modified_base 5: mod_base = OTHER; note = 2'-O-methyluridine
  modified_base 6: mod_base = OTHER; note = 2'-O-methylguanosine
  modified_base 7: mod_base = OTHER; note = 2'-O-methyluridine
  modified_base 11: mod_base = OTHER; note = 2'-O-methyluridine
  modified_base 16: mod_base = OTHER; note = 2'-O-methylcytidine
  modified_base 17: mod_base = OTHER; note = 2'-O-methyladenosine
  modified_base 18: mod_base = OTHER; note = 2'-O-methylguanosine
  modified_base 19: mod_base = OTHER; note = 2'-O-methylguanosine
  modified_base 20: mod_base = OTHER; note = 2'-O-methyladenosine
  modified_base 21: mod_base = OTHER; note = 2'-O-methylcytidine
  modified_base 25: mod_base = OTHER; note = 2'-O-methylcytidine
  modified_base 26: mod_base = OTHER; note = 2'-O-methylguanosine
  modified_base 27: mod_base = OTHER; note = 2'-O-methyluridine
  modified_base 28: mod_base = OTHER; note = 2'-O-methylcytidine
  modified_base 29: mod_base = OTHER; note = 2'-O-methyluridine
  modified_base 30: mod_base = OTHER; note = 2'-O-methyladenosine
  modified_base 31: mod_base = OTHER; note = 2'-O-methylguanosine
  modified_base 33: mod_base = OTHER; note = 2'-O-methyluridine
  modified_base 39: mod_base = OTHER; note = 2'-O-methyluridine
  modified_base 42: mod_base = OTHER; note = 2'-O-methyluridine
  modified_base 45: mod_base = OTHER; note = 2'-O-methyladenosine
  modified_base 46: mod_base = OTHER; note = 2'-O-methylguanosine
  modified_base 47: mod_base = OTHER; note = 2'-O-methylguanosine
  modified_base 48: mod_base = OTHER; note = 2'-O-methylguanosine
  modified_base 49: mod_base = OTHER; note = 2'-O-methyluridine
  modified_base 50: mod_base = OTHER; note = 2'-O-methylguanosine
  modified_base 51: mod_base = OTHER; note = 2'-O-methyluridine
  modified_base 52: mod_base = OTHER; note = 2'-O-methylguanosine
  modified_base 57: mod_base = OTHER; note = 2'-O-methyladenosine
  modified_base 58: mod_base = OTHER; note = 2'-O-methylcytidine
  modified_base 59: mod_base = OTHER; note = 2'-O-methyluridine
  modified_base 60: mod_base = OTHER; note = 2'-O-methylcytidine
  modified_base 61: mod_base = OTHER; note = 2'-O-methylcytidine
  modified_base 62: mod_base = OTHER; note = 2'-O-methyluridine
  modified_base 64: mod_base = OTHER; note = 2'-O-methyluridine
  modified_base 65: mod_base = OTHER; note = 2'-O-methyluridine
  modified_base 70: mod_base = OTHER; note = 2'-O-methylguanosine
  modified_base 71: mod_base = OTHER; note = 2'-O-methyladenosine
  modified_base 72: mod_base = OTHER; note = 2'-O-methylcytidine
  modified_base 73: mod_base = OTHER; note = 2'-O-methylguanosine
  modified_base 74: mod_base = OTHER; note = 2'-O-methyladenosine
  modified_base 75: mod_base = OTHER; note = 2'-O-methyluridine
  modified_base 76: mod_base = OTHER; note = 2'-O-methylguanosine
  modified_base 77: mod_base = OTHER; note = 2'-O-methyluridine
  modified_base 78: mod_base = OTHER; note = 2'-O-methylcytidine
  modified_base 79: mod_base = OTHER; note = 2'-O-methyluridine
  modified_base 80: mod_base = OTHER; note = 2'-O-methylcytidine
  modified_base 81: mod_base = OTHER; note = 2'-O-methyluridine
  modified_base 82: mod_base = OTHER; note = 2'-O-methyluridine
  modified_base 83: mod_base = OTHER; note = 2'-O-methyladenosine
  modified_base 84: mod_base = OTHER; note = 2'-O-methylcytidine
  modified_base 85: mod_base = OTHER; note = 2'-O-methylguanosine
  modified_base 86: mod_base = OTHER; note = 2'-O-methyladenosine
  modified_base 87: mod_base = OTHER; note = 2'-O-methylguanosine
  modified_base 89: mod_base = OTHER; note = 2'-O-methylcytidine
  modified_base 98: mod_base = OTHER; note = 2'-O-methyladenosine
  modified_base 101: mod_base = OTHER; note = 2'-O-methyluridine
  modified_base 104: mod_base = OTHER; note = 2'-O-methyluridine
  modified_base 105: mod_base = OTHER; note = 2'-O-methylcytidine
  modified_base 108: mod_base = OTHER; note = 2'-O-methyluridine
  modified_base 109: mod_base = OTHER; note = 2'-O-methylguanosine
  modified_base 110: mod_base = OTHER; note = 2'-O-methylguanosine
  modified_base 115: mod_base = OTHER; note = 2'-O-methyluridine
  modified_base 117: mod_base = OTHER; note = 2'-O-methyladenosine phosphorothioate
  modified_base 118: mod_base = OTHER; note = 2'-O-methyluridine phosphorothioate
  modified_base 119: mod_base = OTHER; note = 2'-O-methyluridine phosphorothioate
  modified_base 120: mod_base = OTHER; note = 2'-O-methylcytidine

SEQ ID NO: 227 - RNA, 124 nt, synthetic construct; identical to SEQ ID NO: 7
  source 1..124: mol_type = other RNA
  modified_base 1: mod_base = OTHER; note = 2'-O-methylguanosine phosphorothioate
  modified_base 2: mod_base = OTHER; note = 2'-O-methyluridine phosphorothioate
  modified_base 3: mod_base = OTHER; note = 2'-O-methyluridine phosphorothioate
  modified_base 4: mod_base = OTHER; note = 2'-O-methylcytidine
  modified_base 5: mod_base = OTHER; note = 2'-O-methyluridine
  modified_base 6: mod_base = OTHER; note = 2'-O-methylguanosine
  modified_base 7: mod_base = OTHER; note = 2'-O-methyluridine
  modified_base 11: mod_base = OTHER; note = 2'-O-methyluridine
  modified_base 16: mod_base = OTHER; note = 2'-O-methylcytidine
  modified_base 17: mod_base = OTHER; note = 2'-O-methyladenosine
  modified_base 18: mod_base = OTHER; note = 2'-O-methylguanosine
  modified_base 19: mod_base = OTHER; note = 2'-O-methylguanosine
  modified_base 20: mod_base = OTHER; note = 2'-O-methyladenosine
  modified_base 21: mod_base = OTHER; note = 2'-O-methylcytidine
  modified_base 25: mod_base = OTHER; note = 2'-O-methylcytidine
  modified_base 26: mod_base = OTHER; note = 2'-O-methylguanosine
  modified_base 27: mod_base = OTHER; note = 2'-O-methyluridine
  modified_base 28: mod_base = OTHER; note = 2'-O-methylcytidine
  modified_base 29: mod_base = OTHER; note = 2'-O-methyluridine
  modified_base 30: mod_base = OTHER; note = 2'-O-methyladenosine
  modified_base 31: mod_base = OTHER; note = 2'-O-methylguanosine
  modified_base 39: mod_base = OTHER; note = 2'-O-methyluridine
  modified_base 42: mod_base = OTHER; note = 2'-O-methyluridine
  modified_base 45: mod_base = OTHER; note = 2'-O-methyladenosine
  modified_base 46: mod_base = OTHER; note = 2'-O-methylguanosine
  modified_base 47: mod_base = OTHER; note = 2'-O-methylguanosine
  modified_base 48: mod_base = OTHER; note = 2'-O-methylguanosine
  modified_base 49: mod_base = OTHER; note = 2'-O-methyluridine
  modified_base 50: mod_base = OTHER; note = 2'-O-methylguanosine
  modified_base 51: mod_base = OTHER; note = 2'-O-methyluridine
  modified_base 52: mod_base = OTHER; note = 2'-O-methylguanosine
  modified_base 57: mod_base = OTHER; note = 2'-O-methyladenosine
  modified_base 58: mod_base = OTHER; note = 2'-O-methylcytidine
  modified_base 59: mod_base = OTHER; note = 2'-O-methyluridine
  modified_base 60: mod_base = OTHER; note = 2'-O-methylcytidine
  modified_base 61: mod_base = OTHER; note = 2'-O-methylcytidine
  modified_base 62: mod_base = OTHER; note = 2'-O-methyluridine
  modified_base 64: mod_base = OTHER; note = 2'-O-methyluridine
  modified_base 65: mod_base = OTHER; note = 2'-O-methyluridine
  modified_base 70: mod_base = OTHER; note = 2'-O-methylguanosine
  modified_base 71: mod_base = OTHER; note = 2'-O-methyladenosine
  modified_base 72: mod_base = OTHER; note = 2'-O-methylcytidine
  modified_base 73: mod_base = OTHER; note = 2'-O-methylguanosine
  modified_base 74: mod_base = OTHER; note = 2'-O-methyladenosine
  modified_base 75: mod_base = OTHER; note = 2'-O-methyluridine
  modified_base 76: mod_base = OTHER; note = 2'-O-methylguanosine
  modified_base 77: mod_base = OTHER; note = 2'-O-methyluridine
  modified_base 78: mod_base = OTHER; note = 2'-O-methylcytidine
  modified_base 79: mod_base = OTHER; note = 2'-O-methyluridine
  modified_base 80: mod_base = OTHER; note = 2'-O-methylcytidine
  modified_base 81: mod_base = OTHER; note = 2'-O-methyluridine
  modified_base 82: mod_base = OTHER; note = 2'-O-methyluridine
  modified_base 83: mod_base = OTHER; note = 2'-O-methyladenosine
  modified_base 84: mod_base = OTHER; note = 2'-O-methylcytidine
  modified_base 85: mod_base = OTHER; note = 2'-O-methylguanosine
  modified_base 86: mod_base = OTHER; note = 2'-O-methyladenosine
  modified_base 87: mod_base = OTHER; note = 2'-O-methylguanosine
  modified_base 98: mod_base = OTHER; note = 2'-O-methyladenosine
  modified_base 104: mod_base = OTHER; note = 2'-O-methyluridine
  modified_base 105: mod_base = OTHER; note = 2'-O-methylcytidine
  modified_base 109: mod_base = OTHER; note = 2'-O-methylguanosine
  modified_base 110: mod_base = OTHER; note = 2'-O-methylguanosine
  modified_base 117: mod_base = OTHER; note = 2'-O-methyladenosine
  modified_base 118: mod_base = OTHER; note = 2'-O-methyluridine
  modified_base 119: mod_base = OTHER; note = 2'-O-methyluridine
  modified_base 120: mod_base = OTHER; note = 2'-O-methylcytidine
  modified_base 121: mod_base = OTHER; note = 2'-O-methyluridine phosphorothioate
  modified_base 122: mod_base = OTHER; note = 2'-O-methyluridine phosphorothioate
  modified_base 123: mod_base = OTHER; note = 2'-O-methyluridine phosphorothioate
  modified_base 124: mod_base = OTHER; note = 2'-O-methyluridine

SEQ ID NO: 228 - RNA, 124 nt, synthetic construct; identical to SEQ ID NO: 1
  source 1..124: mol_type = other RNA
  modified_base 1: mod_base = OTHER; note = 2'-O-methylguanosine phosphorothioate
  modified_base 2: mod_base = OTHER; note = 2'-O-methyluridine phosphorothioate
  modified_base 121: mod_base = OTHER; note = 2'-O-methyluridine phosphorothioate
  modified_base 122: mod_base = OTHER; note = 2'-O-methyluridine phosphorothioate
  modified_base 123: mod_base = OTHER; note = 2'-O-methyluridine phosphorothioate
  modified_base 124: mod_base = OTHER; note = 2'-O-methyluridine

SEQ ID NO: 229 - RNA, 124 nt, synthetic construct; identical to SEQ ID NO: 1
  source 1..124: mol_type = other RNA
  modified_base 1: mod_base = OTHER; note = 2'-O-methylguanosine phosphorothioate
  modified_base 2: mod_base = OTHER; note = 2'-O-methyluridine phosphorothioate
  modified_base 4: mod_base = OTHER; note = 2'-O-methylcytidine
  modified_base 5: mod_base = OTHER; note = 2'-O-methyluridine
  modified_base 6: mod_base = OTHER; note = 2'-O-methylguanosine
  modified_base 7: mod_base = OTHER; note = 2'-O-methyluridine
  modified_base 11: mod_base = OTHER; note = 2'-O-methyluridine
  modified_base 16: mod_base = OTHER; note = 2'-O-methylcytidine
  modified_base 17: mod_base = OTHER; note = 2'-O-methyladenosine
  modified_base 18: mod_base = OTHER; note = 2'-O-methylguanosine
  modified_base 19: mod_base = OTHER; note = 2'-O-methylguanosine
  modified_base 20: mod_base = OTHER; note = 2'-O-methyladenosine
  modified_base 21: mod_base = OTHER; note = 2'-O-methylcytidine
  modified_base 25: mod_base = OTHER; note = 2'-O-methylcytidine
  modified_base 26: mod_base = OTHER; note = 2'-O-methylguanosine
  modified_base 27: mod_base = OTHER; note = 2'-O-methyluridine
  modified_base 28: mod_base = OTHER; note = 2'-O-methylcytidine
  modified_base 29: mod_base = OTHER; note = 2'-O-methyluridine
  modified_base 30: mod_base = OTHER; note = 2'-O-methyladenosine
  modified_base 31: mod_base = OTHER; note = 2'-O-methylguanosine
  modified_base 39: mod_base = OTHER; note = 2'-O-methyluridine
  modified_base 42: mod_base = OTHER; note = 2'-O-methyluridine
  modified_base 45: mod_base = OTHER; note = 2'-O-methyladenosine
  modified_base 46: mod_base = OTHER; note = 2'-O-methylguanosine
  modified_base 47: mod_base = OTHER; note = 2'-O-methylguanosine
  modified_base 48: mod_base = OTHER; note = 2'-O-methylguanosine
  modified_base 49: mod_base = OTHER; note = 2'-O-methyluridine
  modified_base 50: mod_base = OTHER; note = 2'-O-methylguanosine
  modified_base 51: mod_base = OTHER; note = 2'-O-methyluridine
  modified_base 52: mod_base = OTHER; note = 2'-O-methylguanosine
  modified_base 57: mod_base = OTHER; note = 2'-O-methyladenosine
  modified_base 58: mod_base = OTHER; note = 2'-O-methylcytidine
  modified_base 59: mod_base = OTHER; note = 2'-O-methyluridine
  modified_base 60: mod_base = OTHER; note = 2'-O-methylcytidine
  modified_base 61: mod_base = OTHER; note = 2'-O-methylcytidine
  modified_base 62: mod_base = OTHER; note = 2'-O-methyluridine
  modified_base 64: mod_base = OTHER; note = 2'-O-methyluridine
  modified_base 65: mod_base = OTHER; note = 2'-O-methyluridine
  modified_base 70: mod_base = OTHER; note = 2'-O-methylguanosine
  modified_base 71: mod_base = OTHER; note = 2'-O-methyladenosine
  modified_base 72: mod_base = OTHER; note = 2'-O-methylcytidine
  modified_base 73: mod_base = OTHER; note = 2'-O-methylguanosine
  modified_base 74: mod_base = OTHER; note = 2'-O-methyladenosine
  modified_base 75: mod_base = OTHER; note = 2'-O-methyluridine
  modified_base 76: mod_base = OTHER; note = 2'-O-methylguanosine
  modified_base 77: mod_base = OTHER; note = 2'-O-methyluridine
  modified_base 78: mod_base = OTHER; note = 2'-O-methylcytidine
  modified_base 79: mod_base = OTHER; note = 2'-O-methyluridine
  modified_base 80: mod_base = OTHER; note = 2'-O-methylcytidine
  modified_base 81: mod_base = OTHER; note = 2'-O-methyluridine
  modified_base 82: mod_base = OTHER; note = 2'-O-methyluridine
  modified_base 83: mod_base = OTHER; note = 2'-O-methyladenosine
  modified_base 84: mod_base = OTHER; note = 2'-O-methylcytidine
  modified_base 85: mod_base = OTHER; note = 2'-O-methylguanosine
  modified_base 86: mod_base = OTHER; note = 2'-O-methyladenosine
  modified_base 87: mod_base = OTHER; note = 2'-O-methylguanosine
  modified_base 117: mod_base = OTHER; note = 2'-O-methyluridine
  modified_base 121: mod_base = OTHER; note = 2'-O-methyluridine phosphorothioate
  modified_base 122: mod_base = OTHER; note = 2'-O-methyluridine phosphorothioate
  modified_base 123: mod_base = OTHER; note = 2'-O-methyluridine phosphorothioate
  modified_base 124: mod_base = OTHER; note = 2'-O-methyluridine

SEQ ID NO: 230 - RNA, 124 nt, synthetic construct; identical to SEQ ID NO: 1
  source 1..124: mol_type = other RNA
  modified_base 1: mod_base = OTHER; note = 2'-O-methylguanosine phosphorothioate
  modified_base 2: mod_base = OTHER; note = 2'-O-methyluridine phosphorothioate
  modified_base 98: mod_base = OTHER; note = 2'-O-methyladenosine
  modified_base 104: mod_base = OTHER; note = 2'-O-methylcytidine
  modified_base 105: mod_base = OTHER; note = 2'-O-methyladenosine
  modified_base 109: mod_base = OTHER; note = 2'-O-methyluridine
  modified_base 110: mod_base = OTHER; note = 2'-O-methyladenosine
  modified_base 117: mod_base = OTHER; note = 2'-O-methyluridine
  modified_base 118: mod_base = OTHER; note = 2'-O-methyladenosine
  modified_base 119: mod_base = OTHER; note = 2'-O-methyladenosine
  modified_base 120: mod_base = OTHER; note = 2'-O-methyladenosine
  modified_base 121: mod_base = OTHER; note = 2'-O-methyluridine phosphorothioate
  modified_base 122: mod_base = OTHER; note = 2'-O-methyluridine phosphorothioate
  modified_base 123: mod_base = OTHER; note = 2'-O-methyluridine phosphorothioate
  modified_base 124: mod_base = OTHER; note = 2'-O-methyluridine

SEQ ID NO: 231 - RNA, 124 nt, synthetic construct; identical to SEQ ID NO: 1
  source 1..124: mol_type = other RNA
  modified_base 1: mod_base = OTHER; note = 2'-O-methylguanosine phosphorothioate
  modified_base 2: mod_base = OTHER; note = 2'-O-methyluridine phosphorothioate
  modified_base 4: mod_base = OTHER; note = 2'-O-methylcytidine
  modified_base 5: mod_base = OTHER; note = 2'-O-methyluridine
  modified_base 6: mod_base = OTHER; note = 2'-O-methylguanosine
  modified_base 7: mod_base = OTHER; note = 2'-O-methyluridine
  modified_base 11: mod_base = OTHER; note = 2'-O-methyluridine
  modified_base 16: mod_base = OTHER; note = 2'-O-methylcytidine
  modified_base 17: mod_base = OTHER; note = 2'-O-methyladenosine
  modified_base 18: mod_base = OTHER; note = 2'-O-methylguanosine
  modified_base 19: mod_base = OTHER; note = 2'-O-methylguanosine
  modified_base 20: mod_base = OTHER; note = 2'-O-methyladenosine
  modified_base 21: mod_base = OTHER; note = 2'-O-methylcytidine
  modified_base 25: mod_base = OTHER; note = 2'-O-methylcytidine
  modified_base 26: mod_base = OTHER; note = 2'-O-methylguanosine
  modified_base 27: mod_base = OTHER; note = 2'-O-methyluridine
  modified_base 28: mod_base = OTHER; note = 2'-O-methylcytidine
  modified_base 29: mod_base = OTHER; note = 2'-O-methyluridine
  modified_base 30: mod_base = OTHER; note = 2'-O-methyladenosine
  modified_base 31: mod_base = OTHER; note = 2'-O-methylguanosine
  modified_base 39: mod_base = OTHER; note = 2'-O-methyluridine
  modified_base 42: mod_base = OTHER; note = 2'-O-methyluridine
  modified_base 45: mod_base = OTHER; note = 2'-O-methyladenosine
  modified_base 46: mod_base = OTHER; note = 2'-O-methylguanosine
  modified_base 47: mod_base = OTHER; note = 2'-O-methylguanosine
  modified_base 48: mod_base = OTHER; note = 2'-O-methylguanosine
  modified_base 49: mod_base = OTHER; note = 2'-O-methyluridine
  modified_base 50: mod_base = OTHER; note = 2'-O-methylguanosine
  modified_base 51: mod_base = OTHER; note = 2'-O-methyluridine
  modified_base 52: mod_base = OTHER; note = 2'-O-methylguanosine
  modified_base 57: mod_base = OTHER; note = 2'-O-methyladenosine
  modified_base 58: mod_base = OTHER; note = 2'-O-methylcytidine
  modified_base 59: mod_base = OTHER; note = 2'-O-methyluridine
  modified_base 60: mod_base = OTHER; note = 2'-O-methylcytidine
  modified_base 61: mod_base = OTHER; note = 2'-O-methylcytidine
  modified_base 62: mod_base = OTHER; note = 2'-O-methyluridine
  modified_base 64: mod_base = OTHER; note = 2'-O-methyluridine
  modified_base 65: mod_base = OTHER; note = 2'-O-methyluridine
  modified_base 70: mod_base = OTHER; note = 2'-O-methylguanosine
  modified_base 71: mod_base = OTHER; note = 2'-O-methyladenosine
  modified_base 72: mod_base = OTHER; note = 2'-O-methylcytidine
  modified_base 73: mod_base = OTHER; note = 2'-O-methylguanosine
  modified_base 74: mod_base = OTHER; note = 2'-O-methyladenosine
  modified_base 75: mod_base = OTHER; note = 2'-O-methyluridine
  modified_base 76: mod_base = OTHER; note = 2'-O-methylguanosine
  modified_base 77: mod_base = OTHER; note = 2'-O-methyluridine
  modified_base 78: mod_base = OTHER; note = 2'-O-methylcytidine
  modified_base 79: mod_base = OTHER; note = 2'-O-methyluridine
  modified_base 80: mod_base = OTHER; note = 2'-O-methylcytidine
  modified_base 81: mod_base = OTHER; note = 2'-O-methyluridine
  modified_base 82: mod_base = OTHER; note = 2'-O-methyluridine
  modified_base 83: mod_base = OTHER; note = 2'-O-methyladenosine
  modified_base 84: mod_base = OTHER; note = 2'-O-methylcytidine
  modified_base 85: mod_base = OTHER; note = 2'-O-methylguanosine
  modified_base 86: mod_base = OTHER; note = 2'-O-methyladenosine
  modified_base 87: mod_base = OTHER; note = 2'-O-methylguanosine
  modified_base 121: mod_base = OTHER; note = 2'-O-methyluridine phosphorothioate
  modified_base 122: mod_base = OTHER; note = 2'-O-methyluridine phosphorothioate
  modified_base 123: mod_base = OTHER; note = 2'-O-methyluridine phosphorothioate
  modified_base 124: mod_base = OTHER; note = 2'-O-methyluridine

SEQ ID NO: 232 - RNA, 124 nt, synthetic construct; identical to SEQ ID NO: 1
  source 1..124: mol_type = other RNA
  modified_base 1: mod_base = OTHER; note = 2'-O-methylguanosine phosphorothioate
  modified_base 2: mod_base = OTHER; note = 2'-O-methyluridine phosphorothioate
  modified_base 4: mod_base = OTHER; note = 2'-O-methylcytidine
  modified_base 5: mod_base = OTHER; note = 2'-O-methyluridine
  modified_base 6: mod_base = OTHER; note = 2'-O-methylguanosine
  modified_base 7: mod_base = OTHER; note = 2'-O-methyluridine
  modified_base 11: mod_base = OTHER; note = 2'-O-methyluridine
  modified_base 16: mod_base = OTHER; note = 2'-O-methylcytidine
  modified_base 17: mod_base = OTHER; note = 2'-O-methyladenosine
  modified_base 18: mod_base = OTHER; note = 2'-O-methylguanosine
  modified_base 19: mod_base = OTHER; note = 2'-O-methylguanosine
  modified_base 20: mod_base = OTHER; note = 2'-O-methyladenosine
  modified_base 21: mod_base = OTHER; note = 2'-O-methylcytidine
  modified_base 25: mod_base = OTHER; note = 2'-O-methylcytidine
  modified_base 26: mod_base = OTHER; note = 2'-O-methylguanosine
  modified_base 27: mod_base = OTHER; note = 2'-O-methyluridine
  modified_base 28: mod_base = OTHER; note = 2'-O-methylcytidine
  modified_base 29: mod_base = OTHER; note = 2'-O-methyluridine
  modified_base 30: mod_base = OTHER; note = 2'-O-methyladenosine
  modified_base 31: mod_base = OTHER; note = 2'-O-methylguanosine
  modified_base 39: mod_base = OTHER; note = 2'-O-methyluridine
  modified_base 42: mod_base = OTHER; note = 2'-O-methyluridine
  modified_base 45: mod_base = OTHER; note = 2'-O-methyladenosine
  modified_base 46: mod_base = OTHER; note = 2'-O-methylguanosine
  modified_base 47: mod_base = OTHER; note = 2'-O-methylguanosine
  modified_base 48: mod_base = OTHER; note = 2'-O-methylguanosine
  modified_base 49: mod_base = OTHER; note = 2'-O-methyluridine
  modified_base 50: mod_base = OTHER; note = 2'-O-methylguanosine
  modified_base 51: mod_base = OTHER; note = 2'-O-methyluridine
  modified_base 52: mod_base = OTHER; note = 2'-O-methylguanosine
  modified_base 57: mod_base = OTHER; note = 2'-O-methyladenosine
  modified_base 58: mod_base = OTHER; note = 2'-O-methylcytidine
  modified_base 59: mod_base = OTHER; note = 2'-O-methyluridine
  modified_base 60: mod_base = OTHER; note = 2'-O-methylcytidine
  modified_base 61: mod_base = OTHER; note = 2'-O-methylcytidine
  modified_base 62: mod_base = OTHER; note = 2'-O-methyluridine
  modified_base 64: mod_base = OTHER; note = 2'-O-methyluridine
  modified_base 65: mod_base = OTHER; note = 2'-O-methyluridine
  modified_base 70: mod_base = OTHER; note = 2'-O-methylguanosine
  modified_base 71: mod_base = OTHER; note = 2'-O-methyladenosine
  modified_base 72: mod_base = OTHER; note = 2'-O-methylcytidine
  modified_base 73: mod_base = OTHER; note = 2'-O-methylguanosine
  modified_base 74: mod_base = OTHER; note = 2'-O-methyladenosine
  modified_base 75: mod_base = OTHER; note = 2'-O-methyluridine
  modified_base 76: mod_base = OTHER; note = 2'-O-methylguanosine
  modified_base 77: mod_base = OTHER; note = 2'-O-methyluridine
  modified_base 78: mod_base = OTHER; note = 2'-O-methylcytidine
  modified_base 79: mod_base = OTHER; note = 2'-O-methyluridine
  modified_base 80: mod_base = OTHER; note = 2'-O-methylcytidine
  modified_base 81: mod_base = OTHER; note = 2'-O-methyluridine
  modified_base 82: mod_base = OTHER; note = 2'-O-methyluridine
  modified_base 83: mod_base = OTHER; note = 2'-O-methyladenosine
  modified_base 84: mod_base = OTHER; note = 2'-O-methylcytidine
  modified_base 85: mod_base = OTHER; note = 2'-O-methylguanosine
  modified_base 86: mod_base = OTHER; note = 2'-O-methyladenosine
  modified_base 87: mod_base = OTHER; note = 2'-O-methylguanosine
  modified_base 117: mod_base = OTHER; note = 2'-O-methyluridine
  modified_base 118: mod_base = OTHER; note = 2'-O-methyladenosine
  modified_base 119: mod_base = OTHER; note = 2'-O-methyladenosine
  modified_base 120: mod_base = OTHER; note = 2'-O-methyladenosine
  modified_base 121: mod_base = OTHER; note = 2'-O-methyluridine phosphorothioate
  modified_base 122: mod_base = OTHER; note = 2'-O-methyluridine phosphorothioate
  modified_base 123: mod_base = OTHER; note = 2'-O-methyluridine phosphorothioate
  modified_base 124: mod_base = OTHER; note = 2'-O-methyluridine

SEQ ID NO: 233 - RNA, 124 nt, synthetic construct; identical to SEQ ID NO: 1
  source 1..124: mol_type = other RNA
  modified_base 1: mod_base = OTHER; note = 2'-O-methylguanosine phosphorothioate
  modified_base 2: mod_base = OTHER; note = 2'-O-methyluridine phosphorothioate
  modified_base 4: mod_base = OTHER; note = 2'-O-methylcytidine
  modified_base 5: mod_base = OTHER; note = 2'-O-methyluridine
  modified_base 6: mod_base = OTHER; note = 2'-O-methylguanosine
  modified_base 7: mod_base = OTHER; note = 2'-O-methyluridine
  modified_base 11: mod_base = OTHER; note = 2'-O-methyluridine
  modified_base 16: mod_base = OTHER; note = 2'-O-methylcytidine
  modified_base 17: mod_base = OTHER; note = 2'-O-methyladenosine
  modified_base 18: mod_base = OTHER; note = 2'-O-methylguanosine
  modified_base 19: mod_base = OTHER; note = 2'-O-methylguanosine
  modified_base 20: mod_base = OTHER; note = 2'-O-methyladenosine
  modified_base 21: mod_base = OTHER; note = 2'-O-methylcytidine
  modified_base 25: mod_base = OTHER; note = 2'-O-methylcytidine
  modified_base 26: mod_base = OTHER; note = 2'-O-methylguanosine
  modified_base 27: mod_base = OTHER; note = 2'-O-methyluridine
  modified_base 28: mod_base = OTHER; note = 2'-O-methylcytidine
  modified_base 29: mod_base = OTHER; note = 2'-O-methyluridine
  modified_base 30: mod_base = OTHER; note = 2'-O-methyladenosine
  modified_base 31: mod_base = OTHER; note = 2'-O-methylguanosine
  modified_base 39: mod_base = OTHER; note = 2'-O-methyluridine
  modified_base 42: mod_base = OTHER; note = 2'-O-methyluridine
  modified_base 45: mod_base = OTHER; note = 2'-O-methyladenosine
  modified_base 46: mod_base = OTHER; note = 2'-O-methylguanosine
  modified_base 47: mod_base = OTHER; note = 2'-O-methylguanosine
  modified_base 48: mod_base = OTHER; note = 2'-O-methylguanosine
  modified_base 49: mod_base = OTHER; note = 2'-O-methyluridine
  modified_base 50: mod_base = OTHER; note = 2'-O-methylguanosine
  modified_base 51: mod_base = OTHER; note = 2'-O-methyluridine
  modified_base 52: mod_base = OTHER; note = 2'-O-methylguanosine
  modified_base 57: mod_base = OTHER; note = 2'-O-methyladenosine
  modified_base 58: mod_base = OTHER; note = 2'-O-methylcytidine
  modified_base 59: mod_base = OTHER; note = 2'-O-methyluridine
  modified_base 60: mod_base = OTHER; note = 2'-O-methylcytidine
  modified_base 61: mod_base = OTHER; note = 2'-O-methylcytidine
  modified_base 62: mod_base = OTHER; note = 2'-O-methyluridine
  modified_base 64: mod_base = OTHER; note = 2'-O-methyluridine
  modified_base 65: mod_base = OTHER; note = 2'-O-methyluridine
  modified_base 70: mod_base = OTHER; note = 2'-O-methylguanosine
  modified_base 71: mod_base = OTHER; note = 2'-O-methyladenosine
  modified_base 72: mod_base = OTHER; note = 2'-O-methylcytidine
  modified_base 73: mod_base = OTHER; note = 2'-O-methylguanosine
  modified_base 74: mod_base = OTHER; note = 2'-O-methyladenosine
  modified_base 75: mod_base = OTHER; note = 2'-O-methyluridine
  modified_base 76: mod_base = OTHER; note = 2'-O-methylguanosine
  modified_base 77: mod_base = OTHER; note = 2'-O-methyluridine
  modified_base 78: mod_base = OTHER; note = 2'-O-methylcytidine
  modified_base 79: mod_base = OTHER; note = 2'-O-methyluridine
  modified_base 80: mod_base = OTHER; note = 2'-O-methylcytidine
  modified_base 81: mod_base = OTHER; note = 2'-O-methyluridine
  modified_base 82: mod_base = OTHER; note = 2'-O-methyluridine
  modified_base 83: mod_base = OTHER; note = 2'-O-methyladenosine
  modified_base 84: mod_base = OTHER; note = 2'-O-methylcytidine
  modified_base 85: mod_base = OTHER; note = 2'-O-methylguanosine
  modified_base 86: mod_base = OTHER; note = 2'-O-methyladenosine
  modified_base 87: mod_base = OTHER; note = 2'-O-methylguanosine
  modified_base 98: mod_base = OTHER; note = 2'-O-methyladenosine
  modified_base 104: mod_base = OTHER; note = 2'-O-methylcytidine
  modified_base 105: mod_base = OTHER; note = 2'-O-methyladenosine
  modified_base 109: mod_base = OTHER; note = 2'-O-methyluridine
  modified_base 110: mod_base = OTHER; note = 2'-O-methyladenosine
  modified_base 117: mod_base = OTHER; note = 2'-O-methyluridine
  modified_base 118: mod_base = OTHER; note = 2'-O-methyladenosine
  modified_base 119: mod_base = OTHER; note = 2'-O-methyladenosine
  modified_base 120: mod_base = OTHER; note = 2'-O-methyladenosine
  modified_base 121: mod_base = OTHER; note = 2'-O-methyluridine phosphorothioate
  modified_base 122: mod_base = OTHER; note = 2'-O-methyluridine phosphorothioate
  modified_base 123: mod_base = OTHER; note = 2'-O-methyluridine phosphorothioate
  modified_base 124: mod_base = OTHER; note = 2'-O-methyluridine

SEQ ID NO: 234 - RNA, 124 nt, synthetic construct; identical to SEQ ID NO: 1
  source 1..124: mol_type = other RNA
  modified_base 1: mod_base = OTHER; note = 2'-O-methylguanosine phosphorothioate
  modified_base 2: mod_base = OTHER; note = 2'-O-methyluridine phosphorothioate
  modified_base 3: mod_base = OTHER; note = 2'-O-methyluridine
  modified_base 121: mod_base = OTHER; note = 2'-O-methyluridine phosphorothioate
  modified_base 122: mod_base = OTHER; note = 2'-O-methyluridine phosphorothioate
  modified_base 123: mod_base = OTHER; note = 2'-O-methyluridine phosphorothioate
  modified_base 124: mod_base = OTHER; note = 2'-O-methyluridine

SEQ ID NO: 235 - RNA, 124 nt, synthetic construct; identical to SEQ ID NO: 1
  source 1..124: mol_type = other RNA
  modified_base 1: mod_base = OTHER; note = 2'-O-methylguanosine phosphorothioate
  modified_base 2: mod_base = OTHER; note = 2'-O-methyluridine phosphorothioate
  modified_base 3: mod_base = OTHER; note = 2'-O-methyluridine
  modified_base 4: mod_base = OTHER; note = 2'-O-methylcytidine
  modified_base 5: mod_base = OTHER; note = 2'-O-methyluridine
  modified_base 6: mod_base = OTHER; note = 2'-O-methylguanosine
  modified_base 7: mod_base = OTHER; note = 2'-O-methyluridine
  modified_base 11: mod_base = OTHER; note = 2'-O-methyluridine
  modified_base 16: mod_base = OTHER; note = 2'-O-methylcytidine
  modified_base 17: mod_base = OTHER; note = 2'-O-methyladenosine
  modified_base 18: mod_base = OTHER; note = 2'-O-methylguanosine
  modified_base 19: mod_base = OTHER; note = 2'-O-methylguanosine
  modified_base 20: mod_base = OTHER; note = 2'-O-methyladenosine
  modified_base 21: mod_base = OTHER; note = 2'-O-methylcytidine
  modified_base 25: mod_base = OTHER; note = 2'-O-methylcytidine
  modified_base 26: mod_base = OTHER; note = 2'-O-methylguanosine
  modified_base 27: mod_base = OTHER; note = 2'-O-methyluridine
  modified_base 28: mod_base = OTHER; note = 2'-O-methylcytidine
  modified_base 29: mod_base = OTHER; note = 2'-O-methyluridine
  modified_base 30: mod_base = OTHER; note = 2'-O-methyladenosine
  modified_base 31: mod_base = OTHER; note = 2'-O-methylguanosine
  modified_base 39: mod_base = OTHER; note = 2'-O-methyluridine
  modified_base 42: mod_base = OTHER; note = 2'-O-methyluridine
  modified_base 45: mod_base = OTHER; note = 2'-O-methyladenosine
  modified_base 46: mod_base = OTHER; note = 2'-O-methylguanosine
  modified_base 47: mod_base = OTHER; note = 2'-O-methylguanosine
  modified_base 48: mod_base = OTHER; note = 2'-O-methylguanosine
  modified_base 49: mod_base = OTHER; note = 2'-O-methyluridine
  modified_base 50: mod_base = OTHER; note = 2'-O-methylguanosine
  modified_base 51: mod_base = OTHER; note = 2'-O-methyluridine
  modified_base 52: mod_base = OTHER; note = 2'-O-methylguanosine
  modified_base 57: mod_base = OTHER; note = 2'-O-methyladenosine
  modified_base 58: mod_base = OTHER; note = 2'-O-methylcytidine
  modified_base 59: mod_base = OTHER; note = 2'-O-methyluridine
  modified_base 60: mod_base = OTHER; note = 2'-O-methylcytidine
  modified_base 61: mod_base = OTHER; note = 2'-O-methylcytidine
  modified_base 62: mod_base = OTHER; note = 2'-O-methyluridine
  modified_base 64: mod_base = OTHER; note = 2'-O-methyluridine
  modified_base 65: mod_base = OTHER; note = 2'-O-methyluridine
  modified_base 70: mod_base = OTHER; note = 2'-O-methylguanosine
  modified_base 71: mod_base = OTHER; note = 2'-O-methyladenosine
  modified_base 72: mod_base = OTHER; note = 2'-O-methylcytidine
  modified_base 73: mod_base = OTHER; note = 2'-O-methylguanosine
  modified_base 74: mod_base = OTHER; note = 2'-O-methyladenosine
  modified_base 75: mod_base = OTHER; note = 2'-O-methyluridine
  modified_base 76: mod_base = OTHER; note = 2'-O-methylguanosine
  modified_base 77: mod_base = OTHER; note = 2'-O-methyluridine
  modified_base 78: mod_base = OTHER; note = 2'-O-methylcytidine
  modified_base 79: mod_base = OTHER; note = 2'-O-methyluridine
  modified_base 80: mod_base = OTHER; note = 2'-O-methylcytidine
  modified_base 81: mod_base = OTHER; note = 2'-O-methyluridine
  modified_base 82: mod_base = OTHER; note = 2'-O-methyluridine
  modified_base 83: mod_base = OTHER; note = 2'-O-methyladenosine
  modified_base 84: mod_base = OTHER; note = 2'-O-methylcytidine
  modified_base 85: mod_base = OTHER; note = 2'-O-methylguanosine
  modified_base 86: mod_base = OTHER; note = 2'-O-methyladenosine
  modified_base 87: mod_base = OTHER; note = 2'-O-methylguanosine
  modified_base 117: mod_base = OTHER; note = 2'-O-methyluridine
  modified_base 121: mod_base = OTHER; note = 2'-O-methyluridine phosphorothioate
  modified_base 122: mod_base = OTHER; note = 2'-O-methyluridine phosphorothioate
  modified_base 123: mod_base = OTHER; note = 2'-O-methyluridine phosphorothioate
  modified_base 124: mod_base = OTHER; note = 2'-O-methyluridine

SEQ ID NO: 236 - RNA, 124 nt, synthetic construct; identical to SEQ ID NO: 1
  source 1..124: mol_type = other RNA
  modified_base 1: mod_base = OTHER; note = 2'-O-methylguanosine phosphorothioate
  modified_base 2: mod_base = OTHER; note = 2'-O-methyluridine phosphorothioate
  modified_base 3: mod_base = OTHER; note = 2'-O-methyluridine
  modified_base 98: mod_base = OTHER; note = 2'-O-methyladenosine
  modified_base 104: mod_base = OTHER; note = 2'-O-methylcytidine
  modified_base 105: mod_base = OTHER; note = 2'-O-methyladenosine
  modified_base 109: mod_base = OTHER; note = 2'-O-methyluridine
  modified_base 110: mod_base = OTHER; note = 2'-O-methyladenosine
  modified_base 117: mod_base = OTHER; note = 2'-O-methyluridine
  modified_base 118: mod_base = OTHER; note = 2'-O-methyladenosine
  modified_base 119: mod_base = OTHER; note = 2'-O-methyladenosine
  modified_base 120: mod_base = OTHER; note = 2'-O-methyladenosine
  modified_base 121: mod_base = OTHER; note = 2'-O-methyluridine phosphorothioate
  modified_base 122: mod_base = OTHER; note = 2'-O-methyluridine phosphorothioate
  modified_base 123: mod_base = OTHER; note = 2'-O-methyluridine phosphorothioate
  modified_base 124: mod_base = OTHER; note = 2'-O-methyluridine

SEQ ID NO: 237 - RNA, 124 nt, synthetic construct; identical to SEQ ID NO: 1
  source 1..124: mol_type = other RNA
  modified_base 1: mod_base = OTHER; note = 2'-O-methylguanosine phosphorothioate
  modified_base 2: mod_base = OTHER; note = 2'-O-methyluridine phosphorothioate
  modified_base 3: mod_base = OTHER; note = 2'-O-methyluridine
  modified_base 4: mod_base = OTHER; note = 2'-O-methylcytidine
  modified_base 5: mod_base = OTHER; note = 2'-O-methyluridine
  modified_base 6: mod_base = OTHER; note = 2'-O-methylguanosine
  modified_base 7: mod_base = OTHER; note = 2'-O-methyluridine
  modified_base 11: mod_base = OTHER; note = 2'-O-methyluridine
  modified_base 16: mod_base = OTHER; note = 2'-O-methylcytidine
  modified_base 17: mod_base = OTHER; note = 2'-O-methyladenosine
  modified_base 18: mod_base = OTHER; note = 2'-O-methylguanosine
  modified_base 19: mod_base = OTHER; note = 2'-O-methylguanosine
  modified_base 20: mod_base = OTHER; note = 2'-O-methyladenosine
  modified_base 21: mod_base = OTHER; note = 2'-O-methylcytidine
  modified_base 25: mod_base = OTHER; note = 2'-O-methylcytidine
  modified_base 26: mod_base = OTHER; note = 2'-O-methylguanosine
  modified_base 27: mod_base = OTHER; note = 2'-O-methyluridine
  modified_base 28: mod_base = OTHER; note = 2'-O-methylcytidine
  modified_base 29: mod_base = OTHER; note = 2'-O-methyluridine
  modified_base 30: mod_base = OTHER; note = 2'-O-methyladenosine
  modified_base 31: mod_base = OTHER; note = 2'-O-methylguanosine
  modified_base 39: mod_base = OTHER; note = 2'-O-methyluridine
  modified_base 42: mod_base = OTHER; note = 2'-O-methyluridine
  modified_base 45: mod_base = OTHER; note = 2'-O-methyladenosine
  modified_base 46: mod_base = OTHER; note = 2'-O-methylguanosine
  modified_base 47: mod_base = OTHER; note = 2'-O-methylguanosine
  modified_base 48: mod_base = OTHER; note = 2'-O-methylguanosine
  modified_base 49: mod_base = OTHER; note = 2'-O-methyluridine
  modified_base 50: mod_base = OTHER; note = 2'-O-methylguanosine
  modified_base 51: mod_base = OTHER; note = 2'-O-methyluridine
  modified_base 52: mod_base = OTHER; note = 2'-O-methylguanosine
  modified_base 57: mod_base = OTHER; note = 2'-O-methyladenosine
  modified_base 58: mod_base = OTHER; note = 2'-O-methylcytidine
  modified_base 59: mod_base = OTHER; note = 2'-O-methyluridine
  modified_base 60: mod_base = OTHER; note = 2'-O-methylcytidine
  modified_base 61: mod_base = OTHER; note = 2'-O-methylcytidine
  modified_base 62: mod_base = OTHER; note = 2'-O-methyluridine
  modified_base 64: mod_base = OTHER; note = 2'-O-methyluridine
  modified_base 65: mod_base = OTHER; note = 2'-O-methyluridine
  modified_base 70: mod_base = OTHER; note = 2'-O-methylguanosine
  modified_base 71: mod_base = OTHER; note = 2'-O-methyladenosine
  modified_base 72: mod_base = OTHER; note = 2'-O-methylcytidine
  modified_base 73: mod_base = OTHER; note = 2'-O-methylguanosine
  modified_base 74: mod_base = OTHER; note = 2'-O-methyladenosine
  modified_base 75: mod_base = OTHER; note = 2'-O-methyluridine
  modified_base 76: mod_base = OTHER; note = 2'-O-methylguanosine
  modified_base 77: mod_base = OTHER; note = 2'-O-methyluridine
  modified_base 78: mod_base = OTHER; note = 2'-O-methylcytidine
  modified_base 79: mod_base = OTHER; note = 2'-O-methyluridine
  modified_base 80: mod_base = OTHER; note = 2'-O-methylcytidine
  modified_base 81: mod_base = OTHER; note = 2'-O-methyluridine
  modified_base 82: mod_base = OTHER; note = 2'-O-methyluridine
  modified_base 83: mod_base = OTHER; note = 2'-O-methyladenosine
  modified_base 84: mod_base = OTHER; note = 2'-O-methylcytidine
  modified_base 85: mod_base = OTHER; note = 2'-O-methylguanosine
  modified_base 86: mod_base = OTHER; note = 2'-O-methyladenosine
  modified_base 87: mod_base = OTHER; note = 2'-O-methylguanosine
  modified_base 121: mod_base = OTHER; note = 2'-O-methyluridine phosphorothioate
  modified_base 122: mod_base = OTHER; note = 2'-O-methyluridine phosphorothioate
  modified_base 123: mod_base = OTHER; note = 2'-O-methyluridine phosphorothioate
  modified_base 124: mod_base = OTHER; note = 2'-O-methyluridine

SEQ ID NO: 238 - RNA, 124 nt, synthetic construct; identical to SEQ ID NO: 1
  source 1..124: mol_type = other RNA
  modified_base 1: mod_base = OTHER; note = 2'-O-methylguanosine phosphorothioate
  modified_base 2: mod_base = OTHER; note = 2'-O-methyluridine phosphorothioate
  modified_base 3: mod_base = OTHER; note = 2'-O-methyluridine
  modified_base 4: mod_base = OTHER; note = 2'-O-methylcytidine
  modified_base 5: mod_base = OTHER; note = 2'-O-methyluridine
  modified_base 6: mod_base = OTHER; note = 2'-O-methylguanosine
  modified_base 7: mod_base = OTHER; note = 2'-O-methyluridine
  modified_base 11: mod_base = OTHER; note = 2'-O-methyluridine
  modified_base 16: mod_base = OTHER; note = 2'-O-methylcytidine
  modified_base 17: mod_base = OTHER; note = 2'-O-methyladenosine
  modified_base 18: mod_base = OTHER; note = 2'-O-methylguanosine
  modified_base 19: mod_base = OTHER; note = 2'-O-methylguanosine
  modified_base 20: mod_base = OTHER; note = 2'-O-methyladenosine
  modified_base 21: mod_base = OTHER; note = 2'-O-methylcytidine
  modified_base 25: mod_base = OTHER; note = 2'-O-methylcytidine
  modified_base 26: mod_base = OTHER; note = 2'-O-methylguanosine
  modified_base 27: mod_base = OTHER; note = 2'-O-methyluridine
  modified_base 28: mod_base = OTHER; note = 2'-O-methylcytidine
  modified_base 29: mod_base = OTHER; note = 2'-O-methyluridine
  modified_base 30: mod_base = OTHER; note = 2'-O-methyladenosine
  modified_base 31: mod_base = OTHER; note = 2'-O-methylguanosine
  modified_base 39: mod_base = OTHER; note = 2'-O-methyluridine
  modified_base 42: mod_base = OTHER; note = 2'-O-methyluridine
  modified_base 45: mod_base = OTHER; note = 2'-O-methyladenosine
  modified_base 46: mod_base = OTHER; note = 2'-O-methylguanosine
  modified_base 47: mod_base = OTHER; note = 2'-O-methylguanosine
  modified_base 48: mod_base = OTHER; note = 2'-O-methylguanosine
  modified_base 49: mod_base = OTHER; note = 2'-O-methyluridine
  modified_base 50: mod_base = OTHER; note = 2'-O-methylguanosine
  modified_base 51: mod_base = OTHER; note = 2'-O-methyluridine
  modified_base 52: mod_base = OTHER; note = 2'-O-methylguanosine
  modified_base 57: mod_base = OTHER; note = 2'-O-methyladenosine
  modified_base 58: mod_base = OTHER; note = 2'-O-methylcytidine
  modified_base 59: mod_base = OTHER; note = 2'-O-methyluridine
  modified_base 60: mod_base = OTHER; note = 2'-O-methylcytidine
  modified_base 61: mod_base = OTHER; note = 2'-O-methylcytidine
  modified_base 62: mod_base = OTHER; note = 2'-O-methyluridine
  modified_base 64: mod_base = OTHER; note = 2'-O-methyluridine
  modified_base 65: mod_base = OTHER; note = 2'-O-methyluridine
  modified_base 70: mod_base = OTHER; note = 2'-O-methylguanosine
  modified_base 71: mod_base = OTHER; note = 2'-O-methyladenosine
  modified_base 72: mod_base = OTHER; note = 2'-O-methylcytidine
  modified_base 73: mod_base = OTHER; note = 2'-O-methylguanosine
  modified_base 74: mod_base = OTHER; note = 2'-O-methyladenosine
  modified_base 75: mod_base = OTHER; note = 2'-O-methyluridine
  modified_base 76: mod_base = OTHER; note = 2'-O-methylguanosine
  modified_base 77: mod_base = OTHER; note = 2'-O-methyluridine
  modified_base 78: mod_base = OTHER; note = 2'-O-methylcytidine
  modified_base 79: mod_base = OTHER; note = 2'-O-methyluridine
  modified_base 80: mod_base = OTHER; note = 2'-O-methylcytidine
  modified_base 81: mod_base = OTHER; note = 2'-O-methyluridine
  modified_base 82: mod_base = OTHER; note = 2'-O-methyluridine
  modified_base 83: mod_base = OTHER; note = 2'-O-methyladenosine
  modified_base 84: mod_base = OTHER; note = 2'-O-methylcytidine
  modified_base 85: mod_base = OTHER; note = 2'-O-methylguanosine
  modified_base 86: mod_base = OTHER; note = 2'-O-methyladenosine
  modified_base 87: mod_base = OTHER; note = 2'-O-methylguanosine
  modified_base 117: mod_base = OTHER; note = 2'-O-methyluridine
  modified_base 118: mod_base = OTHER; note = 2'-O-methyladenosine
  modified_base 119: mod_base = OTHER; note = 2'-O-methyladenosine
  modified_base 120: mod_base = OTHER; note = 2'-O-methyladenosine
  modified_base 121: mod_base = OTHER; note = 2'-O-methyluridine phosphorothioate
  modified_base 122: mod_base = OTHER; note = 2'-O-methyluridine phosphorothioate
  modified_base 123: mod_base = OTHER; note = 2'-O-methyluridine phosphorothioate
  modified_base 124: mod_base = OTHER; note = 2'-O-methyluridine

SEQ ID NO: 239 - RNA, 124 nt, synthetic construct; identical to SEQ ID NO: 1
  source 1..124: mol_type = other RNA
  modified_base 1: mod_base = OTHER; note = 2'-O-methylguanosine phosphorothioate
  modified_base 2: mod_base = OTHER; note = 2'-O-methyluridine phosphorothioate
  modified_base 3: mod_base = OTHER; note = 2'-O-methyluridine
  modified_base 4: mod_base = OTHER; note = 2'-O-methylcytidine
  modified_base 5: mod_base = OTHER; note = 2'-O-methyluridine
  modified_base 6: mod_base = OTHER; note = 2'-O-methylguanosine
  modified_base 7: mod_base = OTHER; note = 2'-O-methyluridine
  modified_base 11: mod_base = OTHER; note = 2'-O-methyluridine
  modified_base 16: mod_base = OTHER; note = 2'-O-methylcytidine
  modified_base 17: mod_base = OTHER; note = 2'-O-methyladenosine
  modified_base 18: mod_base = OTHER; note = 2'-O-methylguanosine
  modified_base 19: mod_base = OTHER; note = 2'-O-methylguanosine
  modified_base 20: mod_base = OTHER; note = 2'-O-methyladenosine
  modified_base 21: mod_base = OTHER; note = 2'-O-methylcytidine
  modified_base 25: mod_base = OTHER; note = 2'-O-methylcytidine
  modified_base 26: mod_base = OTHER; note = 2'-O-methylguanosine
  modified_base 27: mod_base = OTHER; note = 2'-O-methyluridine
  modified_base 28: mod_base = OTHER; note = 2'-O-methylcytidine
  modified_base 29: mod_base = OTHER; note = 2'-O-methyluridine
  modified_base 30: mod_base = OTHER; note = 2'-O-methyladenosine
  modified_base 31: mod_base = OTHER; note = 2'-O-methylguanosine
  modified_base 39: mod_base = OTHER; note = 2'-O-methyluridine
  modified_base 42: mod_base = OTHER; note = 2'-O-methyluridine
  modified_base 45: mod_base = OTHER; note = 2'-O-methyladenosine
  modified_base 46: mod_base = OTHER; note = 2'-O-methylguanosine
  modified_base 47: mod_base = OTHER; note = 2'-O-methylguanosine
  modified_base 48: mod_base = OTHER; note = 2'-O-methylguanosine
  modified_base 49: mod_base = OTHER; note = 2'-O-methyluridine
  modified_base 50: mod_base = OTHER; note = 2'-O-methylguanosine
  modified_base 51: mod_base = OTHER; note = 2'-O-methyluridine
  modified_base 52: mod_base = OTHER; note = 2'-O-methylguanosine
  modified_base 57: mod_base = OTHER; note = 2'-O-methyladenosine
  modified_base 58: mod_base = OTHER; note = 2'-O-methylcytidine
  modified_base 59: mod_base = OTHER; note = 2'-O-methyluridine
  modified_base 60: mod_base = OTHER; note = 2'-O-methylcytidine
  modified_base 61: mod_base = OTHER; note = 2'-O-methylcytidine
  modified_base 62: mod_base = OTHER; note = 2'-O-methyluridine
  modified_base 64: mod_base = OTHER; note = 2'-O-methyluridine
  modified_base 65: mod_base = OTHER; note = 2'-O-methyluridine
  modified_base 70: mod_base = OTHER; note = 2'-O-methylguanosine
  modified_base 71: mod_base = OTHER; note = 2'-O-methyladenosine
  modified_base 72: mod_base = OTHER; note = 2'-O-methylcytidine
  modified_base 73: mod_base = OTHER; note = 2'-O-methylguanosine
  modified_base 74: mod_base = OTHER; note = 2'-O-methyladenosine
  modified_base 75: mod_base = OTHER; note = 2'-O-methyluridine
  modified_base 76: mod_base = OTHER; note = 2'-O-methylguanosine
  modified_base 77: mod_base = OTHER; note = 2'-O-methyluridine
  modified_base 78: mod_base = OTHER; note = 2'-O-methylcytidine
  modified_base 79: mod_base = OTHER; note = 2'-O-methyluridine
  modified_base 80: mod_base = OTHER; note = 2'-O-methylcytidine
  modified_base 81: mod_base = OTHER; note = 2'-O-methyluridine
  modified_base 82: mod_base = OTHER; note = 2'-O-methyluridine
  modified_base 83: mod_base = OTHER; note = 2'-O-methyladenosine
  modified_base 84: mod_base = OTHER; note = 2'-O-methylcytidine
  modified_base 85: mod_base = OTHER; note = 2'-O-methylguanosine
  modified_base 86: mod_base = OTHER; note = 2'-O-methyladenosine
  modified_base 87: mod_base = OTHER; note = 2'-O-methylguanosine
  modified_base 98: mod_base = OTHER; note = 2'-O-methyladenosine
  modified_base 104: mod_base = OTHER; note = 2'-O-methylcytidine
  modified_base 105: mod_base = OTHER; note = 2'-O-methyladenosine
  modified_base 109: mod_base = OTHER; note = 2'-O-methyluridine
  modified_base 110: mod_base = OTHER; note = 2'-O-methyladenosine
  modified_base 117: mod_base = OTHER; note = 2'-O-methyluridine
  modified_base 118: mod_base = OTHER; note = 2'-O-methyladenosine
  modified_base 119: mod_base = OTHER; note = 2'-O-methyladenosine
  modified_base 120: mod_base = OTHER; note = 2'-O-methyladenosine
  modified_base 121: mod_base = OTHER; note = 2'-O-methyluridine phosphorothioate
  modified_base 122: mod_base = OTHER; note = 2'-O-methyluridine phosphorothioate
  modified_base 123: mod_base = OTHER; note = 2'-O-methyluridine phosphorothioate
  modified_base 124: mod_base = OTHER; note = 2'-O-methyluridine

SEQ ID NO: 240 - RNA, 124 nt, synthetic construct; identical to SEQ ID NO: 7
  source 1..124: mol_type = other RNA
  modified_base 1: mod_base = OTHER; note = 2'-O-methylguanosine phosphorothioate
  modified_base 2: mod_base = OTHER; note = 2'-O-methyluridine phosphorothioate
  modified_base 4: mod_base = OTHER; note = 2'-O-methylcytidine
  modified_base 5: mod_base = OTHER; note = 2'-O-methyluridine
  modified_base 6: mod_base = OTHER; note = 2'-O-methylguanosine
  modified_base 7: mod_base = OTHER; note = 2'-O-methyluridine
  modified_base 11: mod_base = OTHER; note = 2'-O-methyluridine
  modified_base 16: mod_base = OTHER; note = 2'-O-methylcytidine
  modified_base 17: mod_base = OTHER; note = 2'-O-methyladenosine
  modified_base 18: mod_base = OTHER; note = 2'-O-methylguanosine
  modified_base 19: mod_base = OTHER; note = 2'-O-methylguanosine
  modified_base 20: mod_base = OTHER; note = 2'-O-methyladenosine
  modified_base 21: mod_base = OTHER; note = 2'-O-methylcytidine
  modified_base 25: mod_base = OTHER; note = 2'-O-methylcytidine
  modified_base 26: mod_base = OTHER; note = 2'-O-methylguanosine
  modified_base 27: mod_base = OTHER; note = 2'-O-methyluridine
  modified_base 28: mod_base = OTHER; note = 2'-O-methylcytidine
  modified_base 29: mod_base = OTHER; note = 2'-O-methyluridine
  modified_base 30: mod_base = OTHER; note = 2'-O-methyladenosine
  modified_base 31: mod_base = OTHER; note = 2'-O-methylguanosine
  modified_base 39: mod_base = OTHER; note = 2'-O-methyluridine
  modified_base 42: mod_base = OTHER; note = 2'-O-methyluridine
  modified_base 45: mod_base = OTHER; note = 2'-O-methyladenosine
  modified_base 46: mod_base = OTHER; note = 2'-O-methylguanosine
  modified_base 47: mod_base = OTHER; note = 2'-O-methylguanosine
  modified_base 48: mod_base = OTHER; note = 2'-O-methylguanosine
  modified_base 49: mod_base = OTHER; note = 2'-O-methyluridine
  modified_base 50: mod_base = OTHER; note = 2'-O-methylguanosine
  modified_base 51: mod_base = OTHER; note = 2'-O-methyluridine
  modified_base 52: mod_base = OTHER; note = 2'-O-methylguanosine
  modified_base 57: mod_base = OTHER; note = 2'-O-methyladenosine
  modified_base 58: mod_base = OTHER; note = 2'-O-methylcytidine
  modified_base 59: mod_base = OTHER; note = 2'-O-methyluridine
  modified_base 60: mod_base = OTHER; note = 2'-O-methylcytidine
  modified_base 61: mod_base = OTHER; note = 2'-O-methylcytidine
  modified_base 62: mod_base = OTHER; note = 2'-O-methyluridine
  modified_base 64: mod_base = OTHER; note = 2'-O-methyluridine
  modified_base 65: mod_base = OTHER; note = 2'-O-methyluridine
  modified_base 70: mod_base = OTHER; note = 2'-O-methylguanosine
  modified_base 71: mod_base = OTHER; note = 2'-O-methyladenosine
  modified_base 72: mod_base = OTHER; note = 2'-O-methylcytidine
  modified_base 73: mod_base = OTHER; note = 2'-O-methylguanosine
  modified_base 74: mod_base = OTHER; note = 2'-O-methyladenosine
  modified_base 75: mod_base = OTHER; note = 2'-O-methyluridine
  modified_base 76: mod_base = OTHER; note = 2'-O-methylguanosine
  modified_base 77: mod_base = OTHER; note = 2'-O-methyluridine
  modified_base 78: mod_base = OTHER; note = 2'-O-methylcytidine
  modified_base 79: mod_base = OTHER; note = 2'-O-methyluridine
  modified_base 80: mod_base = OTHER; note = 2'-O-methylcytidine
  modified_base 81: mod_base = OTHER; note = 2'-O-methyluridine
  modified_base 82: mod_base = OTHER; note = 2'-O-methyluridine
  modified_base 83: mod_base = OTHER; note = 2'-O-methyladenosine
  modified_base 84: mod_base = OTHER; note = 2'-O-methylcytidine
  modified_base 85: mod_base = OTHER; note = 2'-O-methylguanosine
  modified_base 86: mod_base = OTHER; note = 2'-O-methyladenosine
  modified_base 87: mod_base = OTHER; note = 2'-O-methylguanosine
  modified_base 117: mod_base = OTHER; note = 2'-O-methyladenosine
  modified_base 118: mod_base = OTHER; note = 2'-O-methyluridine
  modified_base 119: mod_base = OTHER; note = 2'-O-methyluridine
  modified_base 120: mod_base = OTHER; note = 2'-O-methylcytidine
  modified_base 121: mod_base = OTHER; note = 2'-O-methyluridine phosphorothioate
  modified_base 122: mod_base = OTHER; note = 2'-O-methyluridine phosphorothioate
  modified_base 123: mod_base = OTHER; note = 2'-O-methyluridine phosphorothioate
  modified_base 124: mod_base = OTHER; note = 2'-O-methyluridine

SEQ ID NO: 241 - RNA, 124 nt, synthetic construct; identical to SEQ ID NO: 7
  source 1..124: mol_type = other RNA
  modified_base 1: mod_base = OTHER; note = 2'-O-methylguanosine phosphorothioate
  modified_base 2: mod_base = OTHER; note = 2'-O-methyluridine phosphorothioate
  modified_base 4: mod_base = OTHER; note = 2'-O-methylcytidine
  modified_base 5: mod_base = OTHER; note = 2'-O-methyluridine
  modified_base 6: mod_base = OTHER; note = 2'-O-methylguanosine
  modified_base 7: mod_base = OTHER; note = 2'-O-methyluridine
  modified_base 11: mod_base = OTHER; note = 2'-O-methyluridine
  modified_base 16: mod_base = OTHER; note = 2'-O-methylcytidine
  modified_base 17: mod_base = OTHER; note = 2'-O-methyladenosine
  modified_base 18: mod_base = OTHER; note = 2'-O-methylguanosine
  modified_base 19: mod_base = OTHER; note = 2'-O-methylguanosine
  modified_base 20: mod_base = OTHER; note = 2'-O-methyladenosine
  modified_base 21: mod_base = OTHER; note = 2'-O-methylcytidine
  modified_base 25: mod_base = OTHER; note = 2'-O-methylcytidine
  modified_base 26: mod_base = OTHER; note = 2'-O-methylguanosine
  modified_base 27: mod_base = OTHER; note = 2'-O-methyluridine
  modified_base 28: mod_base = OTHER; note = 2'-O-methylcytidine
  modified_base 29: mod_base = OTHER; note = 2'-O-methyluridine
  modified_base 30: mod_base = OTHER; note = 2'-O-methyladenosine
  modified_base 31: mod_base = OTHER; note = 2'-O-methylguanosine
  modified_base 39: mod_base = OTHER; note = 2'-O-methyluridine
  modified_base 42: mod_base = OTHER; note = 2'-O-methyluridine
  modified_base 45: mod_base = OTHER; note = 2'-O-methyladenosine
  modified_base 46: mod_base = OTHER; note = 2'-O-methylguanosine
  modified_base 47: mod_base = OTHER; note = 2'-O-methylguanosine
  modified_base 48: mod_base = OTHER; note = 2'-O-methylguanosine
  modified_base 49: mod_base = OTHER; note = 2'-O-methyluridine
  modified_base 50: mod_base = OTHER; note = 2'-O-methylguanosine
  modified_base 51: mod_base = OTHER; note = 2'-O-methyluridine
  modified_base 52: mod_base = OTHER; note = 2'-O-methylguanosine
  modified_base 57: mod_base = OTHER; note = 2'-O-methyladenosine
  modified_base 58: mod_base = OTHER; note = 2'-O-methylcytidine
  modified_base 59: mod_base = OTHER; note = 2'-O-methyluridine
  modified_base 60: mod_base = OTHER; note = 2'-O-methylcytidine
  modified_base 61: mod_base = OTHER; note = 2'-O-methylcytidine
  modified_base 62: mod_base = OTHER; note = 2'-O-methyluridine
  modified_base 64: mod_base = OTHER; note = 2'-O-methyluridine
  modified_base 65: mod_base = OTHER; note = 2'-O-methyluridine
  modified_base 70: mod_base = OTHER; note = 2'-O-methylguanosine
  modified_base 71: mod_base = OTHER; note = 2'-O-methyladenosine
  modified_base 72: mod_base = OTHER; note = 2'-O-methylcytidine
  modified_base 73: mod_base = OTHER; note = 2'-O-methylguanosine
  modified_base 74: mod_base = OTHER; note = 2'-O-methyladenosine
  modified_base 75: mod_base = OTHER; note = 2'-O-methyluridine
  modified_base 76: mod_base = OTHER; note = 2'-O-methylguanosine
  modified_base 77: mod_base = OTHER; note = 2'-O-methyluridine
  modified_base 78: mod_base = OTHER; note = 2'-O-methylcytidine
  modified_base 79: mod_base = OTHER; note = 2'-O-methyluridine
  modified_base 80: mod_base = OTHER; note = 2'-O-methylcytidine
  modified_base 81: mod_base = OTHER; note = 2'-O-methyluridine
  modified_base 82: mod_base = OTHER; note = 2'-O-methyluridine
  modified_base 83: mod_base = OTHER; note = 2'-O-methyladenosine
  modified_base 84: mod_base = OTHER; note = 2'-O-methylcytidine
  modified_base 85: mod_base = OTHER; note = 2'-O-methylguanosine
  modified_base 86: mod_base = OTHER; note = 2'-O-methyladenosine
  modified_base 87: mod_base = OTHER; note = 2'-O-methylguanosine
  modified_base 98: mod_base = OTHER; note = 2'-O-methyladenosine
  modified_base 104: mod_base = OTHER; note = 2'-O-methyluridine
  modified_base 105: mod_base = OTHER; note = 2'-O-methylcytidine
  modified_base 109: mod_base = OTHER; note = 2'-O-methylguanosine
  modified_base 110: mod_base = OTHER; note = 2'-O-methylguanosine
  modified_base 117: mod_base = OTHER; note = 2'-O-methyladenosine
  modified_base 118: mod_base = OTHER; note = 2'-O-methyluridine
  modified_base 119: mod_base = OTHER; note = 2'-O-methyluridine
  modified_base 120: mod_base = OTHER; note = 2'-O-methylcytidine
  modified_base 121: mod_base = OTHER; note = 2'-O-methyluridine phosphorothioate
  modified_base 122: mod_base = OTHER; note = 2'-O-methyluridine phosphorothioate
  modified_base 123: mod_base = OTHER; note = 2'-O-methyluridine phosphorothioate
  modified_base 124: mod_base = OTHER; note = 2'-O-methyluridine

SEQ ID NO: 242 - RNA, 124 nt, synthetic construct; identical to SEQ ID NO: 7
  source 1..124: mol_type = other RNA
  modified_base 1: mod_base = OTHER; note = 2'-O-methylguanosine phosphorothioate
  modified_base 2: mod_base = OTHER; note = 2'-O-methyluridine phosphorothioate
  modified_base 3: mod_base = OTHER; note = 2'-O-methyluridine
  modified_base 4: mod_base = OTHER; note = 2'-O-methylcytidine
  modified_base 5: mod_base = OTHER; note = 2'-O-methyluridine
  modified_base 6: mod_base = OTHER; note = 2'-O-methylguanosine
  modified_base 7: mod_base = OTHER; note = 2'-O-methyluridine
  modified_base 11: mod_base = OTHER; note = 2'-O-methyluridine
  modified_base 16: mod_base = OTHER; note = 2'-O-methylcytidine
  modified_base 17: mod_base = OTHER; note = 2'-O-methyladenosine
  modified_base 18: mod_base = OTHER; note = 2'-O-methylguanosine
  modified_base 19: mod_base = OTHER; note = 2'-O-methylguanosine
  modified_base 20: mod_base = OTHER; note = 2'-O-methyladenosine
  modified_base 21: mod_base = OTHER; note = 2'-O-methylcytidine
  modified_base 25: mod_base = OTHER; note = 2'-O-methylcytidine
  modified_base 26: mod_base = OTHER; note = 2'-O-methylguanosine
  modified_base 27: mod_base = OTHER; note = 2'-O-methyluridine
  modified_base 28: mod_base = OTHER; note = 2'-O-methylcytidine
  modified_base 29: mod_base = OTHER; note = 2'-O-methyluridine
  modified_base 30: mod_base = OTHER; note = 2'-O-methyladenosine
  modified_base 31: mod_base = OTHER; note = 2'-O-methylguanosine
  modified_base 39: mod_base = OTHER; note = 2'-O-methyluridine
  modified_base 42: mod_base = OTHER; note = 2'-O-methyluridine
  modified_base 45: mod_base = OTHER; note = 2'-O-methyladenosine
  modified_base 46: mod_base = OTHER; note = 2'-O-methylguanosine
  modified_base 47: mod_base = OTHER; note = 2'-O-methylguanosine
  modified_base 48: mod_base = OTHER; note = 2'-O-methylguanosine
  modified_base 49: mod_base = OTHER; note = 2'-O-methyluridine
  modified_base 50: mod_base = OTHER; note = 2'-O-methylguanosine
  modified_base 51: mod_base = OTHER; note = 2'-O-methyluridine
  modified_base 52: mod_base = OTHER; note = 2'-O-methylguanosine
  modified_base 57: mod_base = OTHER; note = 2'-O-methyladenosine
  modified_base 58: mod_base = OTHER; note = 2'-O-methylcytidine
  modified_base 59: mod_base = OTHER; note = 2'-O-methyluridine
  modified_base 60: mod_base = OTHER; note = 2'-O-methylcytidine
  modified_base 61: mod_base = OTHER; note = 2'-O-methylcytidine
  modified_base 62: mod_base = OTHER; note = 2'-O-methyluridine
  modified_base 64: mod_base = OTHER; note = 2'-O-methyluridine
  modified_base 65: mod_base = OTHER; note = 2'-O-methyluridine
  modified_base 70: mod_base = OTHER; note = 2'-O-methylguanosine
  modified_base 71: mod_base = OTHER; note = 2'-O-methyladenosine
  modified_base 72: mod_base = OTHER; note = 2'-O-methylcytidine
  modified_base 73: mod_base = OTHER; note = 2'-O-methylguanosine
  modified_base 74: mod_base = OTHER; note = 2'-O-methyladenosine
  modified_base 75: mod_base = OTHER; note = 2'-O-methyluridine
  modified_base 76: mod_base = OTHER; note = 2'-O-methylguanosine
  modified_base 77: mod_base = OTHER; note = 2'-O-methyluridine
  modified_base 78: mod_base = OTHER; note = 2'-O-methylcytidine
  modified_base 79: mod_base = OTHER; note = 2'-O-methyluridine
  modified_base 80: mod_base = OTHER; note = 2'-O-methylcytidine
  modified_base 81: mod_base = OTHER; note = 2'-O-methyluridine
  modified_base 82: mod_base = OTHER; note = 2'-O-methyluridine
  modified_base 83: mod_base = OTHER; note = 2'-O-methyladenosine
  modified_base 84: mod_base = OTHER; note = 2'-O-methylcytidine
  modified_base 85: mod_base = OTHER; note = 2'-O-methylguanosine
  modified_base 86: mod_base = OTHER; note = 2'-O-methyladenosine
  modified_base 87: mod_base = OTHER; note = 2'-O-methylguanosine
  modified_base 117: mod_base = OTHER; note = 2'-O-methyladenosine
  modified_base 118: mod_base = OTHER; note = 2'-O-methyluridine
  modified_base 119: mod_base = OTHER; note = 2'-O-methyluridine
  modified_base 120: mod_base = OTHER; note = 2'-O-methylcytidine
  modified_base 121: mod_base = OTHER; note = 2'-O-methyluridine phosphorothioate
  modified_base 122: mod_base = OTHER; note = 2'-O-methyluridine phosphorothioate
  modified_base 123: mod_base = OTHER; note = 2'-O-methyluridine phosphorothioate
  modified_base 124: mod_base = OTHER; note = 2'-O-methyluridine

SEQ ID NO: 243 - RNA, 124 nt, synthetic construct; identical to SEQ ID NO: 7
  source 1..124: mol_type = other RNA
  modified_base 1: mod_base = OTHER; note = 2'-O-methylguanosine phosphorothioate
  modified_base 2: mod_base = OTHER; note = 2'-O-methyluridine phosphorothioate
  modified_base 3: mod_base = OTHER; note = 2'-O-methyluridine
  modified_base 4: mod_base = OTHER; note = 2'-O-methylcytidine
  modified_base 5: mod_base = OTHER; note = 2'-O-methyluridine
  modified_base 6: mod_base = OTHER; note = 2'-O-methylguanosine
  modified_base 7: mod_base = OTHER; note = 2'-O-methyluridine
  modified_base 11: mod_base = OTHER; note = 2'-O-methyluridine
  modified_base 16: mod_base = OTHER; note = 2'-O-methylcytidine
  modified_base 17: mod_base = OTHER; note = 2'-O-methyladenosine
  modified_base 18: mod_base = OTHER; note = 2'-O-methylguanosine
  modified_base 19: mod_base = OTHER; note = 2'-O-methylguanosine
  modified_base 20: mod_base = OTHER; note = 2'-O-methyladenosine
  modified_base 21: mod_base = OTHER; note = 2'-O-methylcytidine
  modified_base 25: mod_base = OTHER; note = 2'-O-methylcytidine
  modified_base 26: mod_base = OTHER; note = 2'-O-methylguanosine
  modified_base 27: mod_base = OTHER; note = 2'-O-methyluridine
  modified_base 28: mod_base = OTHER; note = 2'-O-methylcytidine
  modified_base 29: mod_base = OTHER; note = 2'-O-methyluridine
  modified_base 30: mod_base = OTHER; note = 2'-O-methyladenosine
  modified_base 31: mod_base = OTHER; note = 2'-O-methylguanosine
  modified_base 39: mod_base = OTHER; note = 2'-O-methyluridine
  modified_base 42: mod_base = OTHER; note = 2'-O-methyluridine
  modified_base 45: mod_base = OTHER; note = 2'-O-methyladenosine
  modified_base 46: mod_base = OTHER; note = 2'-O-methylguanosine
  modified_base 47: mod_base = OTHER; note = 2'-O-methylguanosine
  modified_base 48: mod_base = OTHER; note = 2'-O-methylguanosine
  modified_base 49: mod_base = OTHER; note = 2'-O-methyluridine
  modified_base 50: mod_base = OTHER; note = 2'-O-methylguanosine
  modified_base 51: mod_base = OTHER; note = 2'-O-methyluridine
  modified_base 52: mod_base = OTHER; note = 2'-O-methylguanosine
  modified_base 57: mod_base = OTHER; note = 2'-O-methyladenosine
  modified_base 58: mod_base = OTHER; note = 2'-O-methylcytidine
  modified_base 59: mod_base = OTHER; note = 2'-O-methyluridine
  modified_base 60: mod_base = OTHER; note = 2'-O-methylcytidine
  modified_base 61: mod_base = OTHER; note = 2'-O-methylcytidine
  modified_base 62: mod_base = OTHER; note = 2'-O-methyluridine
  modified_base 64: mod_base = OTHER; note = 2'-O-methyluridine
  modified_base 65: mod_base = OTHER; note = 2'-O-methyluridine
  modified_base 70: mod_base = OTHER; note = 2'-O-methylguanosine
  modified_base 71: mod_base = OTHER; note = 2'-O-methyladenosine
  modified_base 72: mod_base = OTHER; note = 2'-O-methylcytidine
  modified_base 73: mod_base = OTHER; note = 2'-O-methylguanosine
  modified_base 74: mod_base = OTHER; note = 2'-O-methyladenosine
  modified_base 75: mod_base = OTHER; note = 2'-O-methyluridine
  modified_base 76: mod_base = OTHER; note = 2'-O-methylguanosine
  modified_base 77: mod_base = OTHER; note = 2'-O-methyluridine
  modified_base 78: mod_base = OTHER; note = 2'-O-methylcytidine
  modified_base 79: mod_base = OTHER; note = 2'-O-methyluridine
  modified_base 80: mod_base = OTHER; note = 2'-O-methylcytidine
  modified_base 81: mod_base = OTHER; note = 2'-O-methyluridine
  modified_base 82: mod_base = OTHER; note = 2'-O-methyluridine
  modified_base 83: mod_base = OTHER; note = 2'-O-methyladenosine
  modified_base 84: mod_base = OTHER; note = 2'-O-methylcytidine
  modified_base 85: mod_base = OTHER; note = 2'-O-methylguanosine
  modified_base 86: mod_base = OTHER; note = 2'-O-methyladenosine
  modified_base 87: mod_base = OTHER; note = 2'-O-methylguanosine
  modified_base 98: mod_base = OTHER; note = 2'-O-methyladenosine
  modified_base 104: mod_base = OTHER; note = 2'-O-methyluridine
  modified_base 105: mod_base = OTHER; note = 2'-O-methylcytidine
  modified_base 109: mod_base = OTHER; note = 2'-O-methylguanosine
  modified_base 110: mod_base = OTHER; note = 2'-O-methylguanosine
  modified_base 117: mod_base = OTHER; note = 2'-O-methyladenosine
  modified_base 118: mod_base = OTHER; note = 2'-O-methyluridine
  modified_base 119: mod_base = OTHER; note = 2'-O-methyluridine
  modified_base 120: mod_base = OTHER; note = 2'-O-methylcytidine
  modified_base 121: mod_base = OTHER; note = 2'-O-methyluridine phosphorothioate
  modified_base 122: mod_base = OTHER; note = 2'-O-methyluridine phosphorothioate
  modified_base 123: mod_base = OTHER; note = 2'-O-methyluridine phosphorothioate
  modified_base 124: mod_base = OTHER; note = 2'-O-methyluridine

SEQ ID NO: 244 - RNA, 120 nt, synthetic construct; identical to SEQ ID NO: 2
  source 1..120: mol_type = other RNA
  modified_base 1: mod_base = OTHER; note = 2'-O-methylguanosine phosphorothioate
  modified_base 2: mod_base = OTHER; note = 2'-O-methyluridine phosphorothioate
  modified_base 5: mod_base = OTHER; note = 2'-O-methyluridine
  modified_base 16: mod_base = OTHER; note = 2'-O-methylcytidine
  modified_base 21: mod_base = OTHER; note = 2'-O-methylcytidine
  modified_base 25: mod_base = OTHER; note = 2'-O-methylcytidine
  modified_base 26: mod_base = OTHER; note = 2'-O-methylguanosine
  modified_base 29: mod_base = OTHER; note = 2'-O-methyluridine
  modified_base 30: mod_base = OTHER; note = 2'-O-methyladenosine
  modified_base 44: mod_base = OTHER; note = 2'-O-methylcytidine
  modified_base 45: mod_base = OTHER; note = 2'-O-methyladenosine
  modified_base 49: mod_base = OTHER; note = 2'-O-methyluridine
  modified_base 50: mod_base = OTHER; note = 2'-O-methylguanosine
  modified_base 62: mod_base = OTHER; note = 2'-O-methyluridine
  modified_base 63: mod_base = OTHER; note = 2'-O-methyladenosine
  modified_base 67: mod_base = OTHER; note = 2'-O-methylcytidine
  modified_base 68: mod_base = OTHER; note = 2'-O-methyluridine
  modified_base 69: mod_base = OTHER; note = 2'-O-methylguanosine
  modified_base 72: mod_base = OTHER; note = 2'-O-methylcytidine
  modified_base 75: mod_base = OTHER; note = 2'-O-methyluridine
  modified_base 76: mod_base = OTHER; note = 2'-O-methylguanosine
  modified_base 79: mod_base = OTHER; note = 2'-O-methyluridine
  modified_base 82: mod_base = OTHER; note = 2'-O-methyluridine
  modified_base 83: mod_base = OTHER; note = 2'-O-methyladenosine
  modified_base 84: mod_base = OTHER; note = 2'-O-methylcytidine
  modified_base 117: mod_base = OTHER; note = 2'-O-methyluridine phosphorothioate
  modified_base 118: mod_base = OTHER; note = 2'-O-methyladenosine phosphorothioate
  modified_base 119: mod_base = OTHER; note = 2'-O-methyladenosine phosphorothioate
  modified_base 120: mod_base = OTHER; note = 2'-O-methyladenosine

SEQ ID NO: 245 - RNA, 120 nt, synthetic construct; identical to SEQ ID NO: 2
  source 1..120: mol_type = other RNA
  modified_base 1: mod_base = OTHER; note = 2'-O-methylguanosine phosphorothioate
  modified_base 2: mod_base = OTHER; note = 2'-O-methyluridine phosphorothioate
  modified_base 5: mod_base = OTHER; note = 2'-O-methyluridine
  modified_base 16: mod_base = OTHER; note = 2'-O-methylcytidine
  modified_base 21: mod_base = OTHER; note = 2'-O-methylcytidine
  modified_base 25: mod_base = OTHER; note = 2'-O-methylcytidine
  modified_base 26: mod_base = OTHER; note = 2'-O-methylguanosine
  modified_base 29: mod_base = OTHER; note = 2'-O-methyluridine
  modified_base 30: mod_base = OTHER; note = 2'-O-methyladenosine
  modified_base 33: mod_base = OTHER; note = 2'-O-methyluridine
  modified_base 35: mod_base = OTHER; note = 2'-O-methyluridine
  modified_base 37: mod_base = OTHER; note = 2'-O-methyladenosine
  modified_base 39: mod_base = OTHER; note = 2'-O-methyluridine
  modified_base 44: mod_base = OTHER; note = 2'-O-methylcytidine
  modified_base 45: mod_base = OTHER; note = 2'-O-methyladenosine
  modified_base 47: mod_base = OTHER; note = 2'-O-methylguanosine
  modified_base 49: mod_base = OTHER; note = 2'-O-methyluridine
  modified_base 50: mod_base = OTHER; note = 2'-O-methylguanosine
  modified_base 51: mod_base = OTHER; note = 2'-O-methyluridine
  modified_base 62: mod_base = OTHER; note = 2'-O-methyluridine
  modified_base 63: mod_base = OTHER; note = 2'-O-methyladenosine
  modified_base 65: mod_base = OTHER; note = 2'-O-methyluridine
  modified_base 67: mod_base = OTHER; note = 2'-O-methylcytidine
  modified_base 68: mod_base = OTHER; note = 2'-O-methyluridine
  modified_base 69: mod_base = OTHER; note = 2'-O-methylguanosine
  modified_base 72: mod_base = OTHER; note = 2'-O-methylcytidine
  modified_base 75: mod_base = OTHER; note = 2'-O-methyluridine
  modified_base 76: mod_base = OTHER; note = 2'-O-methylguanosine
  modified_base 79: mod_base = OTHER; note = 2'-O-methyluridine
  modified_base 82: mod_base = OTHER; note = 2'-O-methyluridine
  modified_base 83: mod_base = OTHER; note = 2'-O-methyladenosine
  modified_base 84: mod_base = OTHER; note = 2'-O-methylcytidine
  modified_base 86: mod_base = OTHER; note = 2'-O-methyladenosine
  modified_base 87: mod_base = OTHER; note = 2'-O-methylguanosine
  modified_base 89: mod_base = OTHER; note = 2'-O-methylcytidine
  modified_base 92: mod_base = OTHER; note = 2'-O-methyluridine
  modified_base 95: mod_base = OTHER; note = 2'-O-methylcytidine
  modified_base 117: mod_base = OTHER; note = 2'-O-methyluridine phosphorothioate
  modified_base 118: mod_base = OTHER; note = 2'-O-methyladenosine phosphorothioate
  modified_base 119: mod_base = OTHER; note = 2'-O-methyladenosine phosphorothioate
  modified_base 120: mod_base = OTHER; note = 2'-O-methyladenosine

SEQ ID NO: 246 - RNA, 120 nt, synthetic construct; identical to SEQ ID NO: 2
  source 1..120: mol_type = other RNA
  modified_base 1: mod_base = OTHER; note = 2'-O-methylguanosine phosphorothioate
  modified_base 2: mod_base = OTHER; note = 2'-O-methyluridine phosphorothioate
  modified_base 109: mod_base = OTHER; note = 2'-O-methyluridine
  modified_base 113: mod_base = OTHER; note = 2'-O-methylcytidine
  modified_base 117: mod_base = OTHER; note = 2'-O-methyluridine phosphorothioate
  modified_base 118: mod_base = OTHER; note = 2'-O-methyladenosine phosphorothioate
  modified_base 119: mod_base = OTHER; note = 2'-O-methyladenosine phosphorothioate
  modified_base 120: mod_base = OTHER; note = 2'-O-methyladenosine

SEQ ID NO: 247 - RNA, 120 nt, synthetic construct; identical to SEQ ID NO: 2
  source 1..120: mol_type = other RNA
  modified_base 1: mod_base = OTHER; note = 2'-O-methylguanosine phosphorothioate
  modified_base 2: mod_base = OTHER; note = 2'-O-methyluridine phosphorothioate
  modified_base 5: mod_base = OTHER; note = 2'-O-methyluridine
  modified_base 16: mod_base = OTHER; note = 2'-O-methylcytidine
  modified_base 21: mod_base = OTHER; note = 2'-O-methylcytidine
  modified_base 25: mod_base = OTHER; note = 2'-O-methylcytidine
  modified_base 26: mod_base = OTHER; note = 2'-O-methylguanosine
  modified_base 29: mod_base = OTHER; note = 2'-O-methyluridine
  modified_base 30: mod_base = OTHER; note = 2'-O-methyladenosine
  modified_base 44: mod_base = OTHER; note = 2'-O-methylcytidine
  modified_base 45: mod_base = OTHER; note = 2'-O-methyladenosine
  modified_base 49: mod_base = OTHER; note = 2'-O-methyluridine
  modified_base 50: mod_base = OTHER; note = 2'-O-methylguanosine
  modified_base 62: mod_base = OTHER; note = 2'-O-methyluridine
  modified_base 63: mod_base = OTHER; note = 2'-O-methyladenosine
  modified_base 67: mod_base = OTHER; note = 2'-O-methylcytidine
  modified_base 68: mod_base = OTHER; note = 2'-O-methyluridine
  modified_base 69: mod_base = OTHER; note = 2'-O-methylguanosine
  modified_base 72: mod_base = OTHER; note = 2'-O-methylcytidine
  modified_base 75: mod_base = OTHER; note = 2'-O-methyluridine
  modified_base 76: mod_base = OTHER; note = 2'-O-methylguanosine
  modified_base 79: mod_base = OTHER; note = 2'-O-methyluridine
  modified_base 82: mod_base = OTHER; note = 2'-O-methyluridine
  modified_base 83: mod_base = OTHER; note = 2'-O-methyladenosine
  modified_base 84: mod_base = OTHER; note = 2'-O-methylcytidine
  modified_base 109: mod_base = OTHER; note = 2'-O-methyluridine
  modified_base 113: mod_base = OTHER; note = 2'-O-methylcytidine
  modified_base 117: mod_base = OTHER; note = 2'-O-methyluridine phosphorothioate
  modified_base 118: mod_base = OTHER; note = 2'-O-methyladenosine phosphorothioate
  modified_base 119: mod_base = OTHER; note = 2'-O-methyladenosine phosphorothioate
  modified_base 120: mod_base = OTHER; note = 2'-O-methyladenosine

SEQ ID NO: 248 - RNA, 120 nt, synthetic construct; identical to SEQ ID NO: 2
  source 1..120: mol_type = other RNA
  modified_base 1: mod_base = OTHER; note = 2'-O-methylguanosine phosphorothioate
  modified_base 2: mod_base = OTHER; note = 2'-O-methyluridine phosphorothioate
  modified_base 5: mod_base = OTHER; note = 2'-O-methyluridine
  modified_base 16: mod_base = OTHER; note = 2'-O-methylcytidine
  modified_base 21: mod_base = OTHER; note = 2'-O-methylcytidine
  modified_base 25: mod_base = OTHER; note = 2'-O-methylcytidine
  modified_base 26: mod_base = OTHER; note = 2'-O-methylguanosine
  modified_base 29: mod_base = OTHER; note = 2'-O-methyluridine
  modified_base 30: mod_base = OTHER; note = 2'-O-methyladenosine
  modified_base 33: mod_base = OTHER; note = 2'-O-methyluridine
  modified_base 35: mod_base = OTHER; note = 2'-O-methyluridine
  modified_base 37: mod_base = OTHER; note = 2'-O-methyladenosine
  modified_base 39: mod_base = OTHER; note = 2'-O-methyluridine
  modified_base 44: mod_base = OTHER; note = 2'-O-methylcytidine
  modified_base 45: mod_base = OTHER; note = 2'-O-methyladenosine
  modified_base 47: mod_base = OTHER; note = 2'-O-methylguanosine
  modified_base 49: mod_base = OTHER; note = 2'-O-methyluridine
  modified_base 50: mod_base = OTHER; note = 2'-O-methylguanosine
  modified_base 51: mod_base = OTHER; note = 2'-O-methyluridine
  modified_base 62: mod_base = OTHER; note = 2'-O-methyluridine
  modified_base 63: mod_base = OTHER; note = 2'-O-methyladenosine
  modified_base 65: mod_base = OTHER; note = 2'-O-methyluridine
  modified_base 67: mod_base = OTHER; note = 2'-O-methylcytidine
  modified_base 68: mod_base = OTHER; note = 2'-O-methyluridine
  modified_base 69: mod_base = OTHER; note = 2'-O-methylguanosine
  modified_base 72: mod_base = OTHER; note = 2'-O-methylcytidine
  modified_base 75: mod_base = OTHER; note = 2'-O-methyluridine
  modified_base 76: mod_base = OTHER; note = 2'-O-methylguanosine
  modified_base 79: mod_base = OTHER; note = 2'-O-methyluridine
  modified_base 82: mod_base = OTHER; note = 2'-O-methyluridine
  modified_base 83: mod_base = OTHER; note = 2'-O-methyladenosine
  modified_base 84: mod_base = OTHER; note = 2'-O-methylcytidine
  modified_base 86: mod_base = OTHER; note = 2'-O-methyladenosine
  modified_base 87: mod_base = OTHER; note = 2'-O-methylguanosine
  modified_base 89: mod_base = OTHER; note = 2'-O-methylcytidine
  modified_base 92: mod_base = OTHER; note = 2'-O-methyluridine
  modified_base 95: mod_base = OTHER; note = 2'-O-methylcytidine
  modified_base 109: mod_base = OTHER; note = 2'-O-methyluridine
  modified_base 113: mod_base = OTHER; note = 2'-O-methylcytidine
  modified_base 117: mod_base = OTHER; note = 2'-O-methyluridine phosphorothioate
  modified_base 118: mod_base = OTHER; note = 2'-O-methyladenosine phosphorothioate
  modified_base 119: mod_base = OTHER; note = 2'-O-methyladenosine phosphorothioate
  modified_base 120: mod_base = OTHER; note = 2'-O-methyladenosine

SEQ ID NO: 249 - RNA, 120 nt, synthetic construct; identical to SEQ ID NO: 2
  source 1..120: mol_type = other RNA
  modified_base 1: mod_base = OTHER; note = 2'-O-methylguanosine phosphorothioate
  modified_base 2: mod_base = OTHER; note = 2'-O-methyluridine phosphorothioate
  modified_base 4: mod_base = OTHER; note = 2'-O-methylcytidine
  modified_base 5: mod_base = OTHER; note = 2'-O-methyluridine
  modified_base 6: mod_base = OTHER; note = 2'-O-methylguanosine
  modified_base 7: mod_base = OTHER; note = 2'-O-methyluridine
  modified_base 11: mod_base = OTHER; note = 2'-O-methyluridine
  modified_base 16: mod_base = OTHER; note = 2'-O-methylcytidine
  modified_base 17: mod_base = OTHER; note = 2'-O-methyladenosine
  modified_base 18: mod_base = OTHER; note = 2'-O-methylguanosine
  modified_base 19: mod_base = OTHER; note = 2'-O-methylguanosine
  modified_base 20: mod_base = OTHER; note = 2'-O-methyladenosine
  modified_base 21: mod_base = OTHER; note = 2'-O-methylcytidine
  modified_base 25: mod_base = OTHER; note = 2'-O-methylcytidine
  modified_base 26: mod_base = OTHER; note = 2'-O-methylguanosine
  modified_base 27: mod_base = OTHER; note = 2'-O-methyluridine
  modified_base 28: mod_base = OTHER; note = 2'-O-methylcytidine
  modified_base 29: mod_base = OTHER; note = 2'-O-methyluridine
  modified_base 30: mod_base = OTHER; note = 2'-O-methyladenosine
  modified_base 31: mod_base = OTHER; note = 2'-O-methylguanosine
  modified_base 39: mod_base = OTHER; note = 2'-O-methyluridine
  modified_base 42: mod_base = OTHER; note = 2'-O-methyluridine
  modified_base 45: mod_base = OTHER; note = 2'-O-methyladenosine
  modified_base 46: mod_base = OTHER; note = 2'-O-methylguanosine
  modified_base 47: mod_base = OTHER; note = 2'-O-methylguanosine
  modified_base 48: mod_base = OTHER; note = 2'-O-methylguanosine
  modified_base 49: mod_base = OTHER; note = 2'-O-methyluridine
  modified_base 50: mod_base = OTHER; note = 2'-O-methylguanosine
  modified_base 51: mod_base = OTHER; note = 2'-O-methyluridine
  modified_base 52: mod_base = OTHER; note = 2'-O-methylguanosine
  modified_base 57: mod_base = OTHER; note = 2'-O-methyladenosine
  modified_base 58: mod_base = OTHER; note = 2'-O-methylcytidine
  modified_base 59: mod_base = OTHER; note = 2'-O-methyluridine
  modified_base 60: mod_base = OTHER; note = 2'-O-methylcytidine
  modified_base 61: mod_base = OTHER; note = 2'-O-methylcytidine
  modified_base 62: mod_base = OTHER; note = 2'-O-methyluridine
  modified_base 64: mod_base = OTHER; note = 2'-O-methyluridine
  modified_base 65: mod_base = OTHER; note = 2'-O-methyluridine
  modified_base 70: mod_base = OTHER; note = 2'-O-methylguanosine
  modified_base 71: mod_base = OTHER; note = 2'-O-methyladenosine
  modified_base 72: mod_base = OTHER; note = 2'-O-methylcytidine
  modified_base 73: mod_base = OTHER; note = 2'-O-methylguanosine
  modified_base 74: mod_base = OTHER; note = 2'-O-methyladenosine
  modified_base 75: mod_base = OTHER; note = 2'-O-methyluridine
  modified_base 76: mod_base = OTHER; note = 2'-O-methylguanosine
  modified_base 77: mod_base = OTHER; note = 2'-O-methyluridine
  modified_base 78: mod_base = OTHER; note = 2'-O-methylcytidine
  modified_base 79: mod_base = OTHER; note = 2'-O-methyluridine
  modified_base 80: mod_base = OTHER; note = 2'-O-methylcytidine
  modified_base 81: mod_base = OTHER; note = 2'-O-methyluridine
  modified_base 82: mod_base = OTHER; note = 2'-O-methyluridine
  modified_base 83: mod_base = OTHER; note = 2'-O-methyladenosine
  modified_base 84: mod_base = OTHER; note = 2'-O-methylcytidine
  modified_base 85: mod_base = OTHER; note = 2'-O-methylguanosine
  modified_base 86: mod_base = OTHER; note = 2'-O-methyladenosine
  modified_base 87: mod_base = OTHER; note = 2'-O-methylguanosine
  modified_base 117: mod_base = OTHER; note = 2'-O-methyluridine phosphorothioate
  modified_base 118: mod_base = OTHER; note = 2'-O-methyladenosine phosphorothioate
  modified_base 119: mod_base = OTHER; note = 2'-O-methyladenosine phosphorothioate
  modified_base 120: mod_base = OTHER; note = 2'-O-methyladenosine

SEQ ID NO: 250 - RNA, 120 nt, synthetic construct; identical to SEQ ID NO: 2
  source 1..120: mol_type = other RNA
  modified_base 1: mod_base = OTHER; note = 2'-O-methylguanosine phosphorothioate
  modified_base 2: mod_base = OTHER; note = 2'-O-methyluridine phosphorothioate
  modified_base 4: mod_base = OTHER; note = 2'-O-methylcytidine
  modified_base 5: mod_base = OTHER; note = 2'-O-methyluridine
  modified_base 6: mod_base = OTHER; note = 2'-O-methylguanosine
  modified_base 7: mod_base = OTHER; note = 2'-O-methyluridine
  modified_base 11: mod_base = OTHER; note = 2'-O-methyluridine
  modified_base 16: mod_base = OTHER; note = 2'-O-methylcytidine
  modified_base 17: mod_base = OTHER; note = 2'-O-methyladenosine
  modified_base 18: mod_base = OTHER; note = 2'-O-methylguanosine
  modified_base 19: mod_base = OTHER; note = 2'-O-methylguanosine
  modified_base 20: mod_base = OTHER; note = 2'-O-methyladenosine
  modified_base 21: mod_base = OTHER; note = 2'-O-methylcytidine
  modified_base 25: mod_base = OTHER; note = 2'-O-methylcytidine
  modified_base 26: mod_base = OTHER; note = 2'-O-methylguanosine
  modified_base 27: mod_base = OTHER; note = 2'-O-methyluridine
  modified_base 28: mod_base = OTHER; note = 2'-O-methylcytidine
  modified_base 29: mod_base = OTHER; note = 2'-O-methyluridine
  modified_base 30: mod_base = OTHER; note = 2'-O-methyladenosine
  modified_base 31: mod_base = OTHER; note = 2'-O-methylguanosine
  modified_base 45: mod_base = OTHER; note = 2'-O-methyladenosine
  modified_base 46: mod_base = OTHER; note = 2'-O-methylguanosine
  modified_base 47: mod_base = OTHER; note = 2'-O-methylguanosine
  modified_base 48: mod_base = OTHER; note = 2'-O-methylguanosine
  modified_base 49: mod_base = OTHER; note = 2'-O-methyluridine
  modified_base 50: mod_base = OTHER; note = 2'-O-methylguanosine
  modified_base 51: mod_base = OTHER; note = 2'-O-methyluridine
  modified_base 52: mod_base = OTHER; note = 2'-O-methylguanosine
  modified_base 57: mod_base = OTHER; note = 2'-O-methyladenosine
  modified_base 58: mod_base = OTHER; note = 2'-O-methylcytidine
  modified_base 59: mod_base = OTHER; note = 2'-O-methyluridine
  modified_base 60: mod_base = OTHER; note = 2'-O-methylcytidine
  modified_base 61: mod_base = OTHER; note = 2'-O-methylcytidine
  modified_base 62: mod_base = OTHER; note = 2'-O-methyluridine
  modified_base 64: mod_base = OTHER; note = 2'-O-methyluridine
  modified_base 65: mod_base = OTHER; note = 2'-O-methyluridine
  modified_base 70: mod_base = OTHER; note = 2'-O-methylguanosine
  modified_base 71: mod_base = OTHER; note = 2'-O-methyladenosine
  modified_base 72: mod_base = OTHER; note = 2'-O-methylcytidine
  modified_base 73: mod_base = OTHER; note = 2'-O-methylguanosine
  modified_base 74: mod_base = OTHER; note = 2'-O-methyladenosine
  modified_base 75: mod_base = OTHER; note = 2'-O-methyluridine
  modified_base 76: mod_base = OTHER; note = 2'-O-methylguanosine
  modified_base 77: mod_base = OTHER; note = 2'-O-methyluridine
  modified_base 78: mod_base = OTHER; note = 2'-O-methylcytidine
  modified_base 79: mod_base = OTHER; note = 2'-O-methyluridine
  modified_base 80: mod_base = OTHER; note = 2'-O-methylcytidine
  modified_base 81: mod_base = OTHER; note = 2'-O-methyluridine
  modified_base 82: mod_base = OTHER; note = 2'-O-methyluridine
  modified_base 83: mod_base = OTHER; note = 2'-O-methyladenosine
  modified_base 84: mod_base = OTHER; note = 2'-O-methylcytidine
  modified_base 85: mod_base = OTHER; note = 2'-O-methylguanosine
  modified_base 86: mod_base = OTHER; note = 2'-O-methyladenosine
  modified_base 87: mod_base = OTHER; note = 2'-O-methylguanosine
  modified_base 117: mod_base = OTHER; note = 2'-O-methyluridine phosphorothioate
  modified_base 118: mod_base = OTHER; note = 2'-O-methyladenosine phosphorothioate
  modified_base 119: mod_base = OTHER; note = 2'-O-methyladenosine phosphorothioate
  modified_base 120: mod_base = OTHER; note = 2'-O-methyladenosine

SEQ ID NO: 251 - RNA, 120 nt, synthetic construct; identical to SEQ ID NO: 2
  source 1..120: mol_type = other RNA
  modified_base 1: mod_base = OTHER; note = 2'-O-methylguanosine phosphorothioate
  modified_base 2: mod_base = OTHER; note = 2'-O-methyluridine phosphorothioate
  modified_base 25: mod_base = OTHER; note = 2'-O-methylcytidine
  modified_base 26: mod_base = OTHER; note = 2'-O-methylguanosine
  modified_base 27: mod_base = OTHER; note = 2'-O-methyluridine
  modified_base 28: mod_base = OTHER; note = 2'-O-methylcytidine
  modified_base 29: mod_base = OTHER; note = 2'-O-methyluridine
  modified_base 30: mod_base = OTHER; note = 2'-O-methyladenosine
  modified_base 31: mod_base = OTHER; note = 2'-O-methylguanosine
  modified_base 39: mod_base = OTHER; note = 2'-O-methyluridine
  modified_base 42: mod_base = OTHER; note = 2'-O-methyluridine
  modified_base 45: mod_base = OTHER; note = 2'-O-methyladenosine
  modified_base 46: mod_base = OTHER; note = 2'-O-methylguanosine
  modified_base 47: mod_base = OTHER; note = 2'-O-methylguanosine
  modified_base 48: mod_base = OTHER; note = 2'-O-methylguanosine
  modified_base 49: mod_base = OTHER; note = 2'-O-methyluridine
  modified_base 50: mod_base = OTHER; note = 2'-O-methylguanosine
  modified_base 51: mod_base = OTHER; note = 2'-O-methyluridine
  modified_base 52: mod_base = OTHER; note = 2'-O-methylguanosine
  modified_base 57: mod_base = OTHER; note = 2'-O-methyladenosine
  modified_base 58: mod_base = OTHER; note = 2'-O-methylcytidine
  modified_base 59: mod_base = OTHER; note = 2'-O-methyluridine
  modified_base 60: mod_base = OTHER; note = 2'-O-methylcytidine
  modified_base 61: mod_base = OTHER; note = 2'-O-methylcytidine
  modified_base 62: mod_base = OTHER; note = 2'-O-methyluridine
  modified_base 64: mod_base = OTHER; note = 2'-O-methyluridine
  modified_base 65: mod_base = OTHER; note = 2'-O-methyluridine
  modified_base 70: mod_base = OTHER; note = 2'-O-methylguanosine
  modified_base 71: mod_base = OTHER; note = 2'-O-methyladenosine
  modified_base 72: mod_base = OTHER; note = 2'-O-methylcytidine
  modified_base 73: mod_base = OTHER; note = 2'-O-methylguanosine
  modified_base 74: mod_base = OTHER; note = 2'-O-methyladenosine
  modified_base 75: mod_base = OTHER; note = 2'-O-methyluridine
  modified_base 76: mod_base = OTHER; note = 2'-O-methylguanosine
  modified_base 77: mod_base = OTHER; note = 2'-O-methyluridine
  modified_base 78: mod_base = OTHER; note = 2'-O-methylcytidine
  modified_base 79: mod_base = OTHER; note = 2'-O-methyluridine
  modified_base 80: mod_base = OTHER; note = 2'-O-methylcytidine
  modified_base 81: mod_base = OTHER; note = 2'-O-methyluridine
  modified_base 82: mod_base = OTHER; note = 2'-O-methyluridine
  modified_base 83: mod_base = OTHER; note = 2'-O-methyladenosine
  modified_base 84: mod_base = OTHER; note = 2'-O-methylcytidine
  modified_base 85: mod_base = OTHER; note = 2'-O-methylguanosine
  modified_base 86: mod_base = OTHER; note = 2'-O-methyladenosine
  modified_base 87: mod_base = OTHER; note = 2'-O-methylguanosine
  modified_base 117: mod_base = OTHER; note = 2'-O-methyluridine phosphorothioate
  modified_base 118: mod_base = OTHER; note = 2'-O-methyladenosine phosphorothioate
  modified_base 119: mod_base = OTHER; note = 2'-O-methyladenosine phosphorothioate
  modified_base 120: mod_base = OTHER; note = 2'-O-methyladenosine

SEQ ID NO: 252 - RNA, 120 nt, synthetic construct; identical to SEQ ID NO: 2
  source 1..120: mol_type = other RNA
  modified_base 1: mod_base = OTHER; note = 2'-O-methylguanosine phosphorothioate
  modified_base 2: mod_base = OTHER; note = 2'-O-methyluridine phosphorothioate
  modified_base 4: mod_base = OTHER; note = 2'-O-methylcytidine
  modified_base 5: mod_base = OTHER; note = 2'-O-methyluridine
  modified_base 6: mod_base = OTHER; note = 2'-O-methylguanosine
  modified_base 7: mod_base = OTHER; note = 2'-O-methyluridine
  modified_base 11: mod_base = OTHER; note = 2'-O-methyluridine
  modified_base 16: mod_base = OTHER; note = 2'-O-methylcytidine
  modified_base 17: mod_base = OTHER; note = 2'-O-methyladenosine
  modified_base 18: mod_base = OTHER; note = 2'-O-methylguanosine
  modified_base 19: mod_base = OTHER; note = 2'-O-methylguanosine
  modified_base 20: mod_base = OTHER; note = 2'-O-methyladenosine
  modified_base 21: mod_base = OTHER; note = 2'-O-methylcytidine
  modified_base 25: mod_base = OTHER; note = 2'-O-methylcytidine
  modified_base 26: mod_base = OTHER; note = 2'-O-methylguanosine
  modified_base 27: mod_base = OTHER; note = 2'-O-methyluridine
  modified_base 28: mod_base = OTHER; note = 2'-O-methylcytidine
  modified_base 29: mod_base = OTHER; note = 2'-O-methyluridine
  modified_base 30: mod_base = OTHER; note = 2'-O-methyladenosine
  modified_base 31: mod_base = OTHER; note = 2'-O-methylguanosine
  modified_base 39: mod_base = OTHER; note = 2'-O-methyluridine
  modified_base 42: mod_base = OTHER; note = 2'-O-methyluridine
  modified_base 64: mod_base = OTHER; note = 2'-O-methyluridine
  modified_base 65: mod_base = OTHER; note = 2'-O-methyluridine
  modified_base 70: mod_base = OTHER; note = 2'-O-methylguanosine
  modified_base 71: mod_base = OTHER; note = 2'-O-methyladenosine
  modified_base 72: mod_base = OTHER; note = 2'-O-methylcytidine
  modified_base 73: mod_base = OTHER; note = 2'-O-methylguanosine
  modified_base 74: mod_base = OTHER; note = 2'-O-methyladenosine
  modified_base 75: mod_base = OTHER; note = 2'-O-methyluridine
  modified_base 76: mod_base = OTHER; note = 2'-O-methylguanosine
  modified_base 77: mod_base = OTHER; note = 2'-O-methyluridine
  modified_base 78: mod_base = OTHER; note = 2'-O-methylcytidine
  modified_base 79: mod_base = OTHER; note = 2'-O-methyluridine
  modified_base 80: mod_base = OTHER; note = 2'-O-methylcytidine
  modified_base 81: mod_base = OTHER; note = 2'-O-methyluridine
  modified_base 82: mod_base = OTHER; note = 2'-O-methyluridine
  modified_base 83: mod_base = OTHER; note = 2'-O-methyladenosine
  modified_base 84: mod_base = OTHER; note = 2'-O-methylcytidine
  modified_base 85: mod_base = OTHER; note = 2'-O-methylguanosine
  modified_base 86: mod_base = OTHER; note = 2'-O-methyladenosine
  modified_base 87: mod_base = OTHER; note = 2'-O-methylguanosine
  modified_base 117: mod_base = OTHER; note = 2'-O-methyluridine phosphorothioate
  modified_base 118: mod_base = OTHER; note = 2'-O-methyladenosine phosphorothioate
  modified_base 119: mod_base = OTHER; note = 2'-O-methyladenosine phosphorothioate
  modified_base 120: mod_base = OTHER; note = 2'-O-methyladenosine

SEQ ID NO: 253 - RNA, 120 nt, synthetic construct; identical to SEQ ID NO: 2
  source 1..120: mol_type = other RNA
  modified_base 1: mod_base = OTHER; note = 2'-O-methylguanosine phosphorothioate
  modified_base 2: mod_base = OTHER; note = 2'-O-methyluridine phosphorothioate
  modified_base 98: mod_base = OTHER; note = 2'-O-methyladenosine
  modified_base 104: mod_base = OTHER; note = 2'-O-methylcytidine
  modified_base 105: mod_base = OTHER; note = 2'-O-methyladenosine
  modified_base 109: mod_base = OTHER; note = 2'-O-methyluridine
  modified_base 110: mod_base = OTHER; note = 2'-O-methyladenosine
  modified_base 117: mod_base = OTHER; note = 2'-O-methyluridine phosphorothioate
  modified_base 118: mod_base = OTHER; note = 2'-O-methyladenosine phosphorothioate
  modified_base 119: mod_base = OTHER; note = 2'-O-methyladenosine phosphorothioate
  modified_base 120: mod_base = OTHER; note = 2'-O-methyladenosine

SEQ ID NO: 254 - RNA, 120 nt, synthetic construct; identical to SEQ ID NO: 2
  source 1..120: mol_type = other RNA
  modified_base 1: mod_base = OTHER; note = 2'-O-methylguanosine phosphorothioate
  modified_base 2: mod_base = OTHER; note = 2'-O-methyluridine phosphorothioate
  modified_base 4: mod_base = OTHER; note = 2'-O-methylcytidine
  modified_base 5: mod_base = OTHER; note = 2'-O-methyluridine
  modified_base 6: mod_base = OTHER; note = 2'-O-methylguanosine
  modified_base 7: mod_base = OTHER; note = 2'-O-methyluridine
  modified_base 11: mod_base = OTHER; note = 2'-O-methyluridine
  modified_base 16: mod_base = OTHER; note = 2'-O-methylcytidine
  modified_base 17: mod_base = OTHER; note = 2'-O-methyladenosine
  modified_base 18: mod_base = OTHER; note = 2'-O-methylguanosine
  modified_base 19: mod_base = OTHER; note = 2'-O-methylguanosine
  modified_base 20: mod_base = OTHER; note = 2'-O-methyladenosine
  modified_base 21: mod_base = OTHER; note = 2'-O-methylcytidine
  modified_base 25: mod_base = OTHER; note = 2'-O-methylcytidine
  modified_base 26: mod_base = OTHER; note = 2'-O-methylguanosine
  modified_base 27: mod_base = OTHER; note = 2'-O-methyluridine
  modified_base 28: mod_base = OTHER; note = 2'-O-methylcytidine
  modified_base 29: mod_base = OTHER; note = 2'-O-methyluridine
  modified_base 30: mod_base = OTHER; note = 2'-O-methyladenosine
  modified_base 31: mod_base = OTHER; note = 2'-O-methylguanosine
  modified_base 39: mod_base = OTHER; note = 2'-O-methyluridine
  modified_base 42: mod_base = OTHER; note = 2'-O-methyluridine
  modified_base 45: mod_base = OTHER; note = 2'-O-methyladenosine
  modified_base 46: mod_base = OTHER; note = 2'-O-methylguanosine
  modified_base 47: mod_base = OTHER; note = 2'-O-methylguanosine
  modified_base 48: mod_base = OTHER; note = 2'-O-methylguanosine
  modified_base 49: mod_base = OTHER; note = 2'-O-methyluridine
  modified_base 50: mod_base = OTHER; note = 2'-O-methylguanosine
  modified_base 51: mod_base = OTHER; note = 2'-O-methyluridine
  modified_base 52: mod_base = OTHER; note = 2'-O-methylguanosine
  modified_base 57: mod_base = OTHER; note = 2'-O-methyladenosine
  modified_base 58: mod_base = OTHER; note = 2'-O-methylcytidine
  modified_base 59: mod_base = OTHER; note = 2'-O-methyluridine
  modified_base 60: mod_base = OTHER; note = 2'-O-methylcytidine
  modified_base 61: mod_base = OTHER; note = 2'-O-methylcytidine
  modified_base 62: mod_base = OTHER; note = 2'-O-methyluridine
  modified_base 64: mod_base = OTHER; note = 2'-O-methyluridine
  modified_base 65: mod_base = OTHER; note = 2'-O-methyluridine
  modified_base 70: mod_base = OTHER; note = 2'-O-methylguanosine
  modified_base 71: mod_base = OTHER; note = 2'-O-methyladenosine
  modified_base 72: mod_base = OTHER; note = 2'-O-methylcytidine
  modified_base 73: mod_base = OTHER; note = 2'-O-methylguanosine
  modified_base 74: mod_base = OTHER; note = 2'-O-methyladenosine
  modified_base 75: mod_base = OTHER; note = 2'-O-methyluridine
  modified_base 76: mod_base = OTHER; note = 2'-O-methylguanosine
  modified_base 77: mod_base = OTHER; note = 2'-O-methyluridine
  modified_base 78: mod_base = OTHER; note = 2'-O-methylcytidine
  modified_base 79: mod_base = OTHER; note = 2'-O-methyluridine
  modified_base 80: mod_base = OTHER; note = 2'-O-methylcytidine
  modified_base 81: mod_base = OTHER; note = 2'-O-methyluridine
  modified_base 82: mod_base = OTHER; note = 2'-O-methyluridine
  modified_base 83: mod_base = OTHER; note = 2'-O-methyladenosine
  modified_base 84: mod_base = OTHER; note = 2'-O-methylcytidine
  modified_base 85: mod_base = OTHER; note = 2'-O-methylguanosine
  modified_base 86: mod_base = OTHER; note = 2'-O-methyladenosine
  modified_base 87: mod_base = OTHER; note = 2'-O-methylguanosine
  modified_base 98: mod_base = OTHER; note = 2'-O-methyladenosine
  modified_base 104: mod_base = OTHER; note = 2'-O-methylcytidine
  modified_base 105: mod_base = OTHER; note = 2'-O-methyladenosine
  modified_base 109: mod_base = OTHER; note = 2'-O-methyluridine
  modified_base 110: mod_base = OTHER; note = 2'-O-methyladenosine
  modified_base 117: mod_base = OTHER; note = 2'-O-methyluridine phosphorothioate
  modified_base 118: mod_base = OTHER; note = 2'-O-methyladenosine phosphorothioate
  modified_base 119: mod_base = OTHER; note = 2'-O-methyladenosine phosphorothioate
  modified_base 120: mod_base = OTHER; note = 2'-O-methyladenosine

SEQ ID NO: 255 - RNA, 120 nt, synthetic construct; identical to SEQ ID NO: 2
  source 1..120: mol_type = other RNA
  modified_base 1: mod_base = OTHER; note = 2'-O-methylguanosine phosphorothioate
  modified_base 2: mod_base = OTHER; note = 2'-O-methyluridine phosphorothioate
  modified_base 98: mod_base = OTHER; note = 2'-O-methyladenosine
  modified_base 101: mod_base = OTHER; note = 2'-O-methylcytidine
  modified_base 104: mod_base = OTHER; note = 2'-O-methylcytidine
  modified_base 105: mod_base = OTHER; note = 2'-O-methyladenosine
  modified_base 107: mod_base = OTHER; note = 2'-O-methylcytidine
  modified_base 109: mod_base = OTHER; note = 2'-O-methyluridine
  modified_base 110: mod_base = OTHER; note = 2'-O-methyladenosine
  modified_base 117: mod_base = OTHER; note = 2'-O-methyluridine phosphorothioate
  modified_base 118: mod_base = OTHER; note = 2'-O-methyladenosine phosphorothioate
  modified_base 119: mod_base = OTHER; note = 2'-O-methyladenosine phosphorothioate
  modified_base 120: mod_base = OTHER; note = 2'-O-methyladenosine

SEQ ID NO: 256 - RNA, 120 nt, synthetic construct; identical to SEQ ID NO: 2
  source 1..120: mol_type = other RNA
  modified_base 1: mod_base = OTHER; note = 2'-O-methylguanosine phosphorothioate
  modified_base 2: mod_base = OTHER; note = 2'-O-methyluridine phosphorothioate
  modified_base 4: mod_base = OTHER; note = 2'-O-methylcytidine
  modified_base 5: mod_base = OTHER; note = 2'-O-methyluridine
  modified_base 6: mod_base = OTHER; note = 2'-O-methylguanosine
  modified_base 7: mod_base = OTHER; note = 2'-O-methyluridine
  modified_base 11: mod_base = OTHER; note = 2'-O-methyluridine
  modified_base 16: mod_base = OTHER; note = 2'-O-methylcytidine
  modified_base 17: mod_base = OTHER; note = 2'-O-methyladenosine
  modified_base 18: mod_base = OTHER; note = 2'-O-methylguanosine
  modified_base 19: mod_base = OTHER; note = 2'-O-methylguanosine
  modified_base 20: mod_base = OTHER; note = 2'-O-methyladenosine
  modified_base 21: mod_base = OTHER; note = 2'-O-methylcytidine
  modified_base 25: mod_base = OTHER; note = 2'-O-methylcytidine
  modified_base 26: mod_base = OTHER; note = 2'-O-methylguanosine
  modified_base 27: mod_base = OTHER; note = 2'-O-methyluridine
  modified_base 28: mod_base = OTHER; note = 2'-O-methylcytidine
  modified_base 29: mod_base = OTHER; note = 2'-O-methyluridine
  modified_base 30: mod_base = OTHER; note = 2'-O-methyladenosine
  modified_base 31: mod_base = OTHER; note = 2'-O-methylguanosine
  modified_base 33: mod_base = OTHER; note = 2'-O-methyluridine
  modified_base 39: mod_base = OTHER; note = 2'-O-methyluridine
  modified_base 42: mod_base = OTHER; note = 2'-O-methyluridine
  modified_base 45: mod_base = OTHER; note = 2'-O-methyladenosine
  modified_base 46: mod_base = OTHER; note = 2'-O-methylguanosine
  modified_base 47: mod_base = OTHER; note = 2'-O-methylguanosine
  modified_base 48: mod_base = OTHER; note = 2'-O-methylguanosine
  modified_base 49: mod_base = OTHER; note = 2'-O-methyluridine
  modified_base 50: mod_base = OTHER; note = 2'-O-methylguanosine
  modified_base 51: mod_base = OTHER; note = 2'-O-methyluridine
  modified_base 52: mod_base = OTHER; note = 2'-O-methylguanosine
  modified_base 57: mod_base = OTHER; note = 2'-O-methyladenosine
  modified_base 58: mod_base = OTHER; note = 2'-O-methylcytidine
  modified_base 59: mod_base = OTHER; note = 2'-O-methyluridine
  modified_base 60: mod_base = OTHER; note = 2'-O-methylcytidine
  modified_base 61: mod_base = OTHER; note = 2'-O-methylcytidine
  modified_base 62: mod_base = OTHER; note = 2'-O-methyluridine
  modified_base 64: mod_base = OTHER; note = 2'-O-methyluridine
  modified_base 65: mod_base = OTHER; note = 2'-O-methyluridine
  modified_base 70: mod_base = OTHER; note = 2'-O-methylguanosine
  modified_base 71: mod_base = OTHER; note = 2'-O-methyladenosine
  modified_base 72: mod_base = OTHER; note = 2'-O-methylcytidine
  modified_base 73: mod_base = OTHER; note = 2'-O-methylguanosine
  modified_base 74: mod_base = OTHER; note = 2'-O-methyladenosine
  modified_base 75: mod_base = OTHER; note = 2'-O-methyluridine
  modified_base 76: mod_base = OTHER; note = 2'-O-methylguanosine
  modified_base 77: mod_base = OTHER; note = 2'-O-methyluridine
  modified_base 78: mod_base = OTHER; note = 2'-O-methylcytidine
  modified_base 79: mod_base = OTHER; note = 2'-O-methyluridine
  modified_base 80: mod_base = OTHER; note = 2'-O-methylcytidine
  modified_base 81: mod_base = OTHER; note = 2'-O-methyluridine
  modified_base 82: mod_base = OTHER; note = 2'-O-methyluridine
  modified_base 83: mod_base = OTHER; note = 2'-O-methyladenosine
  modified_base 84: mod_base = OTHER; note = 2'-O-methylcytidine
  modified_base 85: mod_base = OTHER; note = 2'-O-methylguanosine
  modified_base 86: mod_base = OTHER; note = 2'-O-methyladenosine
  modified_base 87: mod_base = OTHER; note = 2'-O-methylguanosine
  modified_base 89: mod_base = OTHER; note = 2'-O-methylcytidine
  modified_base 98: mod_base = OTHER; note = 2'-O-methyladenosine
  modified_base 101: mod_base = OTHER; note = 2'-O-methylcytidine
  modified_base 104: mod_base = OTHER; note = 2'-O-methylcytidine
  modified_base 105: mod_base = OTHER; note = 2'-O-methyladenosine
  modified_base 107: mod_base = OTHER; note = 2'-O-methylcytidine
  modified_base 109: mod_base = OTHER; note = 2'-O-methyluridine
  modified_base 110: mod_base = OTHER; note = 2'-O-methyladenosine
  modified_base 117: mod_base = OTHER; note = 2'-O-methyluridine phosphorothioate
  modified_base 118: mod_base = OTHER; note = 2'-O-methyladenosine phosphorothioate
  modified_base 119: mod_base = OTHER; note = 2'-O-methyladenosine phosphorothioate
  modified_base 120: mod_base = OTHER; note = 2'-O-methyladenosine

SEQ ID NO: 257 - RNA, 120 nt, synthetic construct; identical to SEQ ID NO: 2
  source 1..120: mol_type = other RNA
  modified_base 1: mod_base = OTHER; note = 2'-O-methylguanosine phosphorothioate
  modified_base 2: mod_base = OTHER; note = 2'-O-methyluridine phosphorothioate
  modified_base 3: mod_base = OTHER; note = 2'-O-methyluridine
  modified_base 117: mod_base = OTHER; note = 2'-O-methyluridine phosphorothioate
  modified_base 118: mod_base = OTHER; note = 2'-O-methyladenosine phosphorothioate
  modified_base 119: mod_base = OTHER; note = 2'-O-methyladenosine phosphorothioate
  modified_base 120: mod_base = OTHER; note = 2'-O-methyladenosine

SEQ ID NO: 258 - RNA, 120 nt, synthetic construct; identical to SEQ ID NO: 2
  source 1..120: mol_type = other RNA
  modified_base 1: mod_base = OTHER; note = 2'-O-methylguanosine phosphorothioate
  modified_base 2: mod_base = OTHER; note = 2'-O-methyluridine phosphorothioate
  modified_base 3: mod_base = OTHER; note = 2'-O-methyluridine
  modified_base 5: mod_base = OTHER; note = 2'-O-methyluridine
  modified_base 16: mod_base = OTHER; note = 2'-O-methylcytidine
  modified_base 21: mod_base = OTHER; note = 2'-O-methylcytidine
  modified_base 25: mod_base = OTHER; note = 2'-O-methylcytidine
  modified_base 26: mod_base = OTHER; note = 2'-O-methylguanosine
  modified_base 29: mod_base = OTHER; note = 2'-O-methyluridine
  modified_base 30: mod_base = OTHER; note = 2'-O-methyladenosine
  modified_base 44: mod_base = OTHER; note = 2'-O-methylcytidine
  modified_base 45: mod_base = OTHER; note = 2'-O-methyladenosine
  modified_base 49: mod_base = OTHER; note = 2'-O-methyluridine
  modified_base 50: mod_base = OTHER; note = 2'-O-methylguanosine
  modified_base 62: mod_base = OTHER; note = 2'-O-methyluridine
  modified_base 63: mod_base = OTHER; note = 2'-O-methyladenosine
  modified_base 67: mod_base = OTHER; note = 2'-O-methylcytidine
  modified_base 68: mod_base = OTHER; note = 2'-O-methyluridine
  modified_base 69: mod_base = OTHER; note = 2'-O-methylguanosine
  modified_base 72: mod_base = OTHER; note = 2'-O-methylcytidine
  modified_base 75: mod_base = OTHER; note = 2'-O-methyluridine
  modified_base 76: mod_base = OTHER; note = 2'-O-methylguanosine
  modified_base 79: mod_base = OTHER; note = 2'-O-methyluridine
  modified_base 82: mod_base = OTHER; note = 2'-O-methyluridine
  modified_base 83: mod_base = OTHER; note = 2'-O-methyladenosine
  modified_base 84: mod_base = OTHER; note = 2'-O-methylcytidine
  modified_base 117: mod_base = OTHER; note = 2'-O-methyluridine phosphorothioate
  modified_base 118: mod_base = OTHER; note = 2'-O-methyladenosine phosphorothioate
  modified_base 119: mod_base = OTHER; note = 2'-O-methyladenosine phosphorothioate
  modified_base 120: mod_base = OTHER; note = 2'-O-methyladenosine

SEQ ID NO: 259 - RNA, 120 nt, synthetic construct; identical to SEQ ID NO: 2
  source 1..120: mol_type = other RNA
  modified_base 1: mod_base = OTHER; note = 2'-O-methylguanosine phosphorothioate
  modified_base 2: mod_base = OTHER; note = 2'-O-methyluridine phosphorothioate
  modified_base 3: mod_base = OTHER; note = 2'-O-methyluridine
  modified_base 5: mod_base = OTHER; note = 2'-O-methyluridine
  modified_base 16: mod_base = OTHER; note = 2'-O-methylcytidine
  modified_base 21: mod_base = OTHER; note = 2'-O-methylcytidine
  modified_base 25: mod_base = OTHER; note = 2'-O-methylcytidine
  modified_base 26: mod_base = OTHER; note = 2'-O-methylguanosine
  modified_base 29: mod_base = OTHER; note = 2'-O-methyluridine
  modified_base 30: mod_base = OTHER; note = 2'-O-methyladenosine
  modified_base 33: mod_base = OTHER; note = 2'-O-methyluridine
  modified_base 35: mod_base = OTHER; note = 2'-O-methyluridine
  modified_base 37: mod_base = OTHER; note = 2'-O-methyladenosine
  modified_base 39: mod_base = OTHER; note = 2'-O-methyluridine
  modified_base 44: mod_base = OTHER; note = 2'-O-methylcytidine
  modified_base 45: mod_base = OTHER; note = 2'-O-methyladenosine
  modified_base 47: mod_base = OTHER; note = 2'-O-methylguanosine
  modified_base 49: mod_base = OTHER; note = 2'-O-methyluridine
  modified_base 50: mod_base = OTHER; note = 2'-O-methylguanosine
  modified_base 51: mod_base = OTHER; note = 2'-O-methyluridine
  modified_base 62: mod_base = OTHER; note = 2'-O-methyluridine
  modified_base 63: mod_base = OTHER; note = 2'-O-methyladenosine
  modified_base 65: mod_base = OTHER; note = 2'-O-methyluridine
  modified_base 67: mod_base = OTHER; note = 2'-O-methylcytidine
  modified_base 68: mod_base = OTHER; note = 2'-O-methyluridine
  modified_base 69: mod_base = OTHER; note = 2'-O-methylguanosine
  modified_base 72: mod_base = OTHER; note = 2'-O-methylcytidine
  modified_base 75: mod_base = OTHER; note = 2'-O-methyluridine
  modified_base 76: mod_base = OTHER; note = 2'-O-methylguanosine
  modified_base 79: mod_base = OTHER; note = 2'-O-methyluridine
  modified_base 82: mod_base = OTHER; note = 2'-O-methyluridine
  modified_base 83: mod_base = OTHER; note = 2'-O-methyladenosine
  modified_base 84: mod_base = OTHER; note = 2'-O-methylcytidine
  modified_base 86: mod_base = OTHER; note = 2'-O-methyladenosine
  modified_base 87: mod_base = OTHER; note = 2'-O-methylguanosine
  modified_base 89: mod_base = OTHER; note = 2'-O-methylcytidine
  modified_base 92: mod_base = OTHER; note = 2'-O-methyluridine
  modified_base 95: mod_base = OTHER; note = 2'-O-methylcytidine
  modified_base 117: mod_base = OTHER; note = 2'-O-methyluridine phosphorothioate
  modified_base 118: mod_base = OTHER; note = 2'-O-methyladenosine phosphorothioate
  modified_base 119: mod_base = OTHER; note = 2'-O-methyladenosine phosphorothioate
  modified_base 120: mod_base = OTHER; note = 2'-O-methyladenosine

SEQ ID NO: 260 - RNA, 120 nt, synthetic construct; identical to SEQ ID NO: 2
  source 1..120: mol_type = other RNA
  modified_base 1: mod_base = OTHER; note = 2'-O-methylguanosine phosphorothioate
  modified_base 2: mod_base = OTHER; note = 2'-O-methyluridine phosphorothioate
  modified_base 3: mod_base = OTHER; note = 2'-O-methyluridine
  modified_base 109: mod_base = OTHER; note = 2'-O-methyluridine
  modified_base 113: mod_base = OTHER; note = 2'-O-methylcytidine
  modified_base 117: mod_base = OTHER; note = 2'-O-methyluridine phosphorothioate
  modified_base 118: mod_base = OTHER; note = 2'-O-methyladenosine phosphorothioate
  modified_base 119: mod_base = OTHER; note = 2'-O-methyladenosine phosphorothioate
  modified_base 120: mod_base = OTHER; note = 2'-O-methyladenosine

SEQ ID NO: 261 - RNA, 120 nt, synthetic construct; identical to SEQ ID NO: 2
  source 1..120: mol_type = other RNA
  modified_base 1: mod_base = OTHER; note = 2'-O-methylguanosine phosphorothioate
  modified_base 2: mod_base = OTHER; note = 2'-O-methyluridine phosphorothioate
  modified_base 3: mod_base = OTHER; note = 2'-O-methyluridine
  modified_base 5: mod_base = OTHER; note = 2'-O-methyluridine
  modified_base 16: mod_base = OTHER; note = 2'-O-methylcytidine
  modified_base 21: mod_base = OTHER; note = 2'-O-methylcytidine
  modified_base 25: mod_base = OTHER; note = 2'-O-methylcytidine
  modified_base 26: mod_base = OTHER; note = 2'-O-methylguanosine
  modified_base 29: mod_base = OTHER; note = 2'-O-methyluridine
  modified_base 30: mod_base = OTHER; note = 2'-O-methyladenosine
  modified_base 44: mod_base = OTHER; note = 2'-O-methylcytidine
  modified_base 45: mod_base = OTHER; note = 2'-O-methyladenosine
  modified_base 49: mod_base = OTHER; note = 2'-O-methyluridine
  modified_base 50: mod_base = OTHER; note = 2'-O-methylguanosine
  modified_base 62: mod_base = OTHER; note = 2'-O-methyluridine
  modified_base 63: mod_base = OTHER; note = 2'-O-methyladenosine
  modified_base 67: mod_base = OTHER; note = 2'-O-methylcytidine
  modified_base 68: mod_base = OTHER; note = 2'-O-methyluridine
  modified_base 69: mod_base = OTHER; note = 2'-O-methylguanosine
  modified_base 72: mod_base = OTHER; note = 2'-O-methylcytidine
  modified_base 75: mod_base = OTHER; note = 2'-O-methyluridine
  modified_base 76: mod_base = OTHER; note = 2'-O-methylguanosine
  modified_base 79: mod_base = OTHER; note = 2'-O-methyluridine
  modified_base 82: mod_base = OTHER; note = 2'-O-methyluridine
  modified_base 83: mod_base = OTHER; note = 2'-O-methyladenosine
  modified_base 84: mod_base = OTHER; note = 2'-O-methylcytidine
  modified_base 109: mod_base = OTHER; note = 2'-O-methyluridine
  modified_base 113: mod_base = OTHER; note = 2'-O-methylcytidine
  modified_base 117: mod_base = OTHER; note = 2'-O-methyluridine phosphorothioate
  modified_base 118: mod_base = OTHER; note = 2'-O-methyladenosine phosphorothioate
  modified_base 119: mod_base = OTHER; note = 2'-O-methyladenosine phosphorothioate
  modified_base 120: mod_base = OTHER; note = 2'-O-methyladenosine

SEQ ID NO: 262 - RNA, 120 nt, synthetic construct; identical to SEQ ID NO: 2
  source 1..120: mol_type = other RNA
  modified_base 1: mod_base = OTHER; note = 2'-O-methylguanosine phosphorothioate
  modified_base 2: mod_base = OTHER; note = 2'-O-methyluridine phosphorothioate
  modified_base 3: mod_base = OTHER; note = 2'-O-methyluridine
  modified_base 5: mod_base = OTHER; note = 2'-O-methyluridine
  modified_base 16: mod_base = OTHER; note = 2'-O-methylcytidine
  modified_base 21: mod_base = OTHER; note = 2'-O-methylcytidine
  modified_base 25: mod_base = OTHER; note = 2'-O-methylcytidine
  modified_base 26: mod_base = OTHER; note = 2'-O-methylguanosine
  modified_base 29: mod_base = OTHER; note = 2'-O-methyluridine
  modified_base 30: mod_base = OTHER; note = 2'-O-methyladenosine
  modified_base 33: mod_base = OTHER; note = 2'-O-methyluridine
  modified_base 35: mod_base = OTHER; note = 2'-O-methyluridine
  modified_base 37: mod_base = OTHER; note = 2'-O-methyladenosine
  modified_base 39: mod_base = OTHER; note = 2'-O-methyluridine
  modified_base 44: mod_base = OTHER; note = 2'-O-methylcytidine
  modified_base 45: mod_base = OTHER; note = 2'-O-methyladenosine
  modified_base 47: mod_base = OTHER; note = 2'-O-methylguanosine
  modified_base 49: mod_base = OTHER; note = 2'-O-methyluridine
  modified_base 50: mod_base = OTHER; note = 2'-O-methylguanosine
  modified_base 51: mod_base = OTHER; note = 2'-O-methyluridine
  modified_base 62: mod_base = OTHER; note = 2'-O-methyluridine
  modified_base 63: mod_base = OTHER; note = 2'-O-methyladenosine
  modified_base 65: mod_base = OTHER; note = 2'-O-methyluridine
  modified_base 67: mod_base = OTHER; note = 2'-O-methylcytidine
  modified_base 68: mod_base = OTHER; note = 2'-O-methyluridine
  modified_base 69: mod_base = OTHER; note = 2'-O-methylguanosine
  modified_base 72: mod_base = OTHER; note = 2'-O-methylcytidine
  modified_base 75: mod_base = OTHER; note = 2'-O-methyluridine
  modified_base 76: mod_base = OTHER; note = 2'-O-methylguanosine
  modified_base 79: mod_base = OTHER; note = 2'-O-methyluridine
  modified_base 82: mod_base = OTHER; note = 2'-O-methyluridine
  modified_base 83: mod_base = OTHER; note = 2'-O-methyladenosine
  modified_base 84: mod_base = OTHER; note = 2'-O-methylcytidine
  modified_base 86: mod_base = OTHER; note = 2'-O-methyladenosine
  modified_base 87: mod_base = OTHER; note = 2'-O-methylguanosine
  modified_base 89: mod_base = OTHER; note = 2'-O-methylcytidine
  modified_base 92: mod_base = OTHER; note = 2'-O-methyluridine
  modified_base 95: mod_base = OTHER; note = 2'-O-methylcytidine
  modified_base 109: mod_base = OTHER; note = 2'-O-methyluridine
  modified_base 113: mod_base = OTHER; note = 2'-O-methylcytidine
  modified_base 117: mod_base = OTHER; note = 2'-O-methyluridine phosphorothioate
  modified_base 118: mod_base = OTHER; note = 2'-O-methyladenosine phosphorothioate
  modified_base 119: mod_base = OTHER; note = 2'-O-methyladenosine phosphorothioate
  modified_base 120: mod_base = OTHER; note = 2'-O-methyladenosine

SEQ ID NO: 263 - RNA, 120 nt, synthetic construct; identical to SEQ ID NO: 2
  source 1..120: mol_type = other RNA
  modified_base 1: mod_base = OTHER; note = 2'-O-methylguanosine phosphorothioate
  modified_base 2: mod_base = OTHER; note = 2'-O-methyluridine phosphorothioate
  modified_base 3: mod_base = OTHER; note = 2'-O-methyluridine
  modified_base 4: mod_base = OTHER; note = 2'-O-methylcytidine
  modified_base 5: mod_base = OTHER; note = 2'-O-methyluridine
  modified_base 6: mod_base = OTHER; note = 2'-O-methylguanosine
  modified_base 7: mod_base = OTHER; note = 2'-O-methyluridine
  modified_base 11: mod_base = OTHER; note = 2'-O-methyluridine
  modified_base 16: mod_base = OTHER; note = 2'-O-methylcytidine
  modified_base 17: mod_base = OTHER; note = 2'-O-methyladenosine
  modified_base 18: mod_base = OTHER; note = 2'-O-methylguanosine
  modified_base 19: mod_base = OTHER; note = 2'-O-methylguanosine
  modified_base 20: mod_base = OTHER; note = 2'-O-methyladenosine
  modified_base 21: mod_base = OTHER; note = 2'-O-methylcytidine
  modified_base 25: mod_base = OTHER; note = 2'-O-methylcytidine
  modified_base 26: mod_base = OTHER; note = 2'-O-methylguanosine
  modified_base 27: mod_base = OTHER; note = 2'-O-methyluridine
  modified_base 28: mod_base = OTHER; note = 2'-O-methylcytidine
  modified_base 29: mod_base = OTHER; note = 2'-O-methyluridine
  modified_base 30: mod_base = OTHER; note = 2'-O-methyladenosine
  modified_base 31: mod_base = OTHER; note = 2'-O-methylguanosine
  modified_base 39: mod_base = OTHER; note = 2'-O-methyluridine
  modified_base 42: mod_base = OTHER; note = 2'-O-methyluridine
  modified_base 45: mod_base = OTHER; note = 2'-O-methyladenosine
  modified_base 46: mod_base = OTHER; note = 2'-O-methylguanosine
  modified_base 47: mod_base = OTHER; note = 2'-O-methylguanosine
  modified_base 48: mod_base = OTHER; note = 2'-O-methylguanosine
  modified_base 49: mod_base = OTHER; note = 2'-O-methyluridine
  modified_base 50: mod_base = OTHER; note = 2'-O-methylguanosine
  modified_base 51: mod_base = OTHER; note = 2'-O-methyluridine
  modified_base 52: mod_base = OTHER; note = 2'-O-methylguanosine
  modified_base 57: mod_base = OTHER; note = 2'-O-methyladenosine
  modified_base 58: mod_base = OTHER; note = 2'-O-methylcytidine
  modified_base 59: mod_base = OTHER; note = 2'-O-methyluridine
  modified_base 60: mod_base = OTHER; note = 2'-O-methylcytidine
  modified_base 61: mod_base = OTHER; note = 2'-O-methylcytidine
  modified_base 62: mod_base = OTHER; note = 2'-O-methyluridine
  modified_base 64: mod_base = OTHER; note = 2'-O-methyluridine
  modified_base 65: mod_base = OTHER; note = 2'-O-methyluridine
  modified_base 70: mod_base = OTHER; note = 2'-O-methylguanosine
  modified_base 71: mod_base = OTHER; note = 2'-O-methyladenosine
  modified_base 72: mod_base = OTHER; note = 2'-O-methylcytidine
  modified_base 73: mod_base = OTHER; note = 2'-O-methylguanosine
  modified_base 74: mod_base = OTHER; note = 2'-O-methyladenosine
  modified_base 75: mod_base = OTHER; note = 2'-O-methyluridine
  modified_base 76: mod_base = OTHER; note = 2'-O-methylguanosine
  modified_base 77: mod_base = OTHER; note = 2'-O-methyluridine
  modified_base 78: mod_base = OTHER; note = 2'-O-methylcytidine
  modified_base 79: mod_base = OTHER; note = 2'-O-methyluridine
  modified_base 80: mod_base = OTHER; note = 2'-O-methylcytidine
  modified_base 81: mod_base = OTHER; note = 2'-O-methyluridine
  modified_base 82: mod_base = OTHER; note = 2'-O-methyluridine
  modified_base 83: mod_base = OTHER; note = 2'-O-methyladenosine
  modified_base 84: mod_base = OTHER; note = 2'-O-methylcytidine
  modified_base 85: mod_base = OTHER; note = 2'-O-methylguanosine
  modified_base 86: mod_base = OTHER; note = 2'-O-methyladenosine
  modified_base 87: mod_base = OTHER; note = 2'-O-methylguanosine
  modified_base 117: mod_base = OTHER; note = 2'-O-methyluridine phosphorothioate
  modified_base 118: mod_base = OTHER; note = 2'-O-methyladenosine phosphorothioate
  modified_base 119: mod_base = OTHER; note = 2'-O-methyladenosine phosphorothioate
  modified_base 120: mod_base = OTHER; note = 2'-O-methyladenosine

SEQ ID NO: 264 - RNA, 120 nt, synthetic construct; identical to SEQ ID NO: 2
  source 1..120: mol_type = other RNA
  modified_base 1: mod_base = OTHER; note = 2'-O-methylguanosine phosphorothioate
  modified_base 2: mod_base = OTHER; note = 2'-O-methyluridine phosphorothioate
  modified_base 3: mod_base = OTHER; note = 2'-O-methyluridine
  modified_base 4: mod_base = OTHER; note = 2'-O-methylcytidine
  modified_base 5: mod_base = OTHER; note = 2'-O-methyluridine
  modified_base 6: mod_base = OTHER; note = 2'-O-methylguanosine
  modified_base 7: mod_base = OTHER; note = 2'-O-methyluridine
  modified_base 11: mod_base = OTHER; note = 2'-O-methyluridine
  modified_base 16: mod_base = OTHER; note = 2'-O-methylcytidine
  modified_base 17: mod_base = OTHER; note = 2'-O-methyladenosine
  modified_base 18: mod_base = OTHER; note = 2'-O-methylguanosine
  modified_base 19: mod_base = OTHER; note = 2'-O-methylguanosine
  modified_base 20: mod_base = OTHER; note = 2'-O-methyladenosine
  modified_base 21: mod_base = OTHER; note = 2'-O-methylcytidine
  modified_base 25: mod_base = OTHER; note = 2'-O-methylcytidine
  modified_base 26: mod_base = OTHER; note = 2'-O-methylguanosine
  modified_base 27: mod_base = OTHER; note = 2'-O-methyluridine
  modified_base 28: mod_base = OTHER; note = 2'-O-methylcytidine
  modified_base 29: mod_base = OTHER; note = 2'-O-methyluridine
  modified_base 30: mod_base = OTHER; note = 2'-O-methyladenosine
  modified_base 31: mod_base = OTHER; note = 2'-O-methylguanosine
  modified_base 45: mod_base = OTHER; note = 2'-O-methyladenosine
  modified_base 46: mod_base = OTHER; note = 2'-O-methylguanosine
  modified_base 47: mod_base = OTHER; note = 2'-O-methylguanosine
  modified_base 48: mod_base = OTHER; note = 2'-O-methylguanosine
  modified_base 49: mod_base = OTHER; note = 2'-O-methyluridine
  modified_base 50: mod_base = OTHER; note = 2'-O-methylguanosine
  modified_base 51: mod_base = OTHER; note = 2'-O-methyluridine
  modified_base 52: mod_base = OTHER; note = 2'-O-methylguanosine
  modified_base 57: mod_base = OTHER; note = 2'-O-methyladenosine
  modified_base 58: mod_base = OTHER; note = 2'-O-methylcytidine
  modified_base 59: mod_base = OTHER; note = 2'-O-methyluridine
  modified_base 60: mod_base = OTHER; note = 2'-O-methylcytidine
  modified_base 61: mod_base = OTHER; note = 2'-O-methylcytidine
  modified_base 62: mod_base = OTHER; note = 2'-O-methyluridine
  modified_base 64: mod_base = OTHER; note = 2'-O-methyluridine
  modified_base 65: mod_base = OTHER; note = 2'-O-methyluridine
  modified_base 70: mod_base = OTHER; note = 2'-O-methylguanosine
  modified_base 71: mod_base = OTHER; note = 2'-O-methyladenosine
  modified_base 72: mod_base = OTHER; note = 2'-O-methylcytidine
  modified_base 73: mod_base = OTHER; note = 2'-O-methylguanosine
  modified_base 74: mod_base = OTHER; note = 2'-O-methyladenosine
  modified_base 75: mod_base = OTHER; note = 2'-O-methyluridine
  modified_base 76: mod_base = OTHER; note = 2'-O-methylguanosine
  modified_base 77: mod_base = OTHER; note = 2'-O-methyluridine
  modified_base 78: mod_base = OTHER; note = 2'-O-methylcytidine
  modified_base 79: mod_base = OTHER; note = 2'-O-methyluridine
  modified_base 80: mod_base = OTHER; note = 2'-O-methylcytidine
  modified_base 81: mod_base = OTHER; note = 2'-O-methyluridine
  modified_base 82: mod_base = OTHER; note = 2'-O-methyluridine
  modified_base 83: mod_base = OTHER; note = 2'-O-methyladenosine
  modified_base 84: mod_base = OTHER; note = 2'-O-methylcytidine
  modified_base 85: mod_base = OTHER; note = 2'-O-methylguanosine
  modified_base 86: mod_base = OTHER; note = 2'-O-methyladenosine
  modified_base 87: mod_base = OTHER; note = 2'-O-methylguanosine
  modified_base 117: mod_base = OTHER; note = 2'-O-methyluridine phosphorothioate
  modified_base 118: mod_base = OTHER; note = 2'-O-methyladenosine phosphorothioate
  modified_base 119: mod_base = OTHER; note = 2'-O-methyladenosine phosphorothioate
  modified_base 120: mod_base = OTHER; note = 2'-O-methyladenosine

SEQ ID NO: 265 - RNA, 120 nt, synthetic construct; identical to SEQ ID NO: 2
  source 1..120: mol_type = other RNA
  modified_base 1: mod_base = OTHER; note = 2'-O-methylguanosine phosphorothioate
  modified_base 2: mod_base = OTHER; note = 2'-O-methyluridine phosphorothioate
  modified_base 3: mod_base = OTHER; note = 2'-O-methyluridine
  modified_base 25: mod_base = OTHER; note = 2'-O-methylcytidine
  modified_base 26: mod_base = OTHER; note = 2'-O-methylguanosine
  modified_base 27: mod_base = OTHER; note = 2'-O-methyluridine
  modified_base 28: mod_base = OTHER; note = 2'-O-methylcytidine
  modified_base 29: mod_base = OTHER; note = 2'-O-methyluridine
  modified_base 30: mod_base = OTHER; note = 2'-O-methyladenosine
  modified_base 31: mod_base = OTHER; note = 2'-O-methylguanosine
  modified_base 39: mod_base = OTHER; note = 2'-O-methyluridine
  modified_base 42: mod_base = OTHER; note = 2'-O-methyluridine
  modified_base 45: mod_base = OTHER; note = 2'-O-methyladenosine
  modified_base 46: mod_base = OTHER; note = 2'-O-methylguanosine
  modified_base 47: mod_base = OTHER; note = 2'-O-methylguanosine
  modified_base 48: mod_base = OTHER; note = 2'-O-methylguanosine
  modified_base 49: mod_base = OTHER; note = 2'-O-methyluridine
  modified_base 50: mod_base = OTHER; note = 2'-O-methylguanosine
  modified_base 51: mod_base = OTHER; note = 2'-O-methyluridine
  modified_base 52: mod_base = OTHER; note = 2'-O-methylguanosine
  modified_base 57: mod_base = OTHER; note = 2'-O-methyladenosine
  modified_base 58: mod_base = OTHER; note = 2'-O-methylcytidine
  modified_base 59: mod_base = OTHER; note = 2'-O-methyluridine
  modified_base 60: mod_base = OTHER; note = 2'-O-methylcytidine
  modified_base 61: mod_base = OTHER; note = 2'-O-methylcytidine
  modified_base 62: mod_base = OTHER; note = 2'-O-methyluridine
  modified_base 64: mod_base = OTHER; note = 2'-O-methyluridine
  modified_base 65: mod_base = OTHER; note = 2'-O-methyluridine
  modified_base 70: mod_base = OTHER; note = 2'-O-methylguanosine
  modified_base 71: mod_base = OTHER; note = 2'-O-methyladenosine
  modified_base 72: mod_base = OTHER; note = 2'-O-methylcytidine
  modified_base 73: mod_base = OTHER; note = 2'-O-methylguanosine
  modified_base 74: mod_base = OTHER; note = 2'-O-methyladenosine
  modified_base 75: mod_base = OTHER; note = 2'-O-methyluridine
  modified_base 76: mod_base = OTHER; note = 2'-O-methylguanosine
  modified_base 77: mod_base = OTHER; note = 2'-O-methyluridine
  modified_base 78: mod_base = OTHER; note = 2'-O-methylcytidine
  modified_base 79: mod_base = OTHER; note = 2'-O-methyluridine
  modified_base 80: mod_base = OTHER; note = 2'-O-methylcytidine
  modified_base 81: mod_base = OTHER; note = 2'-O-methyluridine
  modified_base 82: mod_base = OTHER; note = 2'-O-methyluridine
  modified_base 83: mod_base = OTHER; note = 2'-O-methyladenosine
  modified_base 84: mod_base = OTHER; note = 2'-O-methylcytidine
  modified_base 85: mod_base = OTHER; note = 2'-O-methylguanosine
  modified_base 86: mod_base = OTHER; note = 2'-O-methyladenosine
  modified_base 87: mod_base = OTHER; note = 2'-O-methylguanosine
  modified_base 117: mod_base = OTHER; note = 2'-O-methyluridine phosphorothioate
  modified_base 118: mod_base = OTHER; note = 2'-O-methyladenosine phosphorothioate
  modified_base 119: mod_base = OTHER; note = 2'-O-methyladenosine phosphorothioate
  modified_base 120: mod_base = OTHER; note = 2'-O-methyladenosine

SEQ ID NO: 266 - RNA, 120 nt, synthetic construct; identical to SEQ ID NO: 2
  source 1..120: mol_type = other RNA
  modified_base 1: mod_base = OTHER; note = 2'-O-methylguanosine phosphorothioate
  modified_base 2: mod_base = OTHER; note = 2'-O-methyluridine phosphorothioate
  modified_base 3: mod_base = OTHER; note = 2'-O-methyluridine
  modified_base 4: mod_base = OTHER; note = 2'-O-methylcytidine
  modified_base 5: mod_base = OTHER; note = 2'-O-methyluridine
  modified_base 6: mod_base = OTHER; note = 2'-O-methylguanosine
  modified_base 7: mod_base = OTHER; note = 2'-O-methyluridine
  modified_base 11: mod_base = OTHER; note = 2'-O-methyluridine
  modified_base 16: mod_base = OTHER; note = 2'-O-methylcytidine
  modified_base 17: mod_base = OTHER; note = 2'-O-methyladenosine
  modified_base 18: mod_base = OTHER; note = 2'-O-methylguanosine
  modified_base 19: mod_base = OTHER; note = 2'-O-methylguanosine
  modified_base 20: mod_base = OTHER; note = 2'-O-methyladenosine
  modified_base 21: mod_base = OTHER; note = 2'-O-methylcytidine
  modified_base 25: mod_base = OTHER; note = 2'-O-methylcytidine
  modified_base 26: mod_base = OTHER; note = 2'-O-methylguanosine
  modified_base 27: mod_base = OTHER; note = 2'-O-methyluridine
  modified_base 28: mod_base = OTHER; note = 2'-O-methylcytidine
  modified_base 29: mod_base = OTHER; note = 2'-O-methyluridine
  modified_base 30: mod_base = OTHER; note = 2'-O-methyladenosine
  modified_base 31: mod_base = OTHER; note = 2'-O-methylguanosine
  modified_base 39: mod_base = OTHER; note = 2'-O-methyluridine
  modified_base 42: mod_base = OTHER; note = 2'-O-methyluridine
  modified_base 64: mod_base = OTHER; note = 2'-O-methyluridine
  modified_base 65: mod_base = OTHER; note = 2'-O-methyluridine
  modified_base 70: mod_base = OTHER; note = 2'-O-methylguanosine
  modified_base 71: mod_base = OTHER; note = 2'-O-methyladenosine
  modified_base 72: mod_base = OTHER; note = 2'-O-methylcytidine
  modified_base 73: mod_base = OTHER; note = 2'-O-methylguanosine
  modified_base 74: mod_base = OTHER; note = 2'-O-methyladenosine
  modified_base 75: mod_base = OTHER; note = 2'-O-methyluridine
  modified_base 76: mod_base = OTHER; note = 2'-O-methylguanosine
  modified_base 77: mod_base = OTHER; note = 2'-O-methyluridine
  modified_base 78: mod_base = OTHER; note = 2'-O-methylcytidine
  modified_base 79: mod_base = OTHER; note = 2'-O-methyluridine
  modified_base 80: mod_base = OTHER; note = 2'-O-methylcytidine
  modified_base 81: mod_base = OTHER; note = 2'-O-methyluridine
  modified_base 82: mod_base = OTHER; note = 2'-O-methyluridine
  modified_base 83: mod_base = OTHER; note = 2'-O-methyladenosine
  modified_base 84: mod_base = OTHER; note = 2'-O-methylcytidine
  modified_base 85: mod_base = OTHER; note = 2'-O-methylguanosine
  modified_base 86: mod_base = OTHER; note = 2'-O-methyladenosine
  modified_base 87: mod_base = OTHER; note = 2'-O-methylguanosine
  modified_base 117: mod_base = OTHER; note = 2'-O-methyluridine phosphorothioate
  modified_base 118: mod_base = OTHER; note = 2'-O-methyladenosine phosphorothioate
  modified_base 119: mod_base = OTHER; note = 2'-O-methyladenosine phosphorothioate
  modified_base 120: mod_base = OTHER; note = 2'-O-methyladenosine

SEQ ID NO: 267 - RNA, 120 nt, synthetic construct; identical to SEQ ID NO: 2
  source 1..120: mol_type = other RNA
  modified_base 1: mod_base = OTHER; note = 2'-O-methylguanosine phosphorothioate
  modified_base 2: mod_base = OTHER; note = 2'-O-methyluridine phosphorothioate
  modified_base 3: mod_base = OTHER; note = 2'-O-methyluridine
  modified_base 98: mod_base = OTHER; note = 2'-O-methyladenosine
  modified_base 104: mod_base = OTHER; note = 2'-O-methylcytidine
  modified_base 105: mod_base = OTHER; note = 2'-O-methyladenosine
  modified_base 109: mod_base = OTHER; note = 2'-O-methyluridine
  modified_base 110: mod_base = OTHER; note = 2'-O-methyladenosine
  modified_base 117: mod_base = OTHER; note = 2'-O-methyluridine phosphorothioate
  modified_base 118: mod_base = OTHER; note = 2'-O-methyladenosine phosphorothioate
  modified_base 119: mod_base = OTHER; note = 2'-O-methyladenosine phosphorothioate
  modified_base 120: mod_base = OTHER; note = 2'-O-methyladenosine

SEQ ID NO: 268 - RNA, 120 nt, synthetic construct; identical to SEQ ID NO: 2
  source 1..120: mol_type = other RNA
  modified_base 1: mod_base = OTHER; note = 2'-O-methylguanosine phosphorothioate
  modified_base 2: mod_base = OTHER; note = 2'-O-methyluridine phosphorothioate
  modified_base 3: mod_base = OTHER; note = 2'-O-methyluridine
  modified_base 4: mod_base = OTHER; note = 2'-O-methylcytidine
  modified_base 5: mod_base = OTHER; note = 2'-O-methyluridine
  modified_base 6: mod_base = OTHER; note = 2'-O-methylguanosine
  modified_base 7: mod_base = OTHER; note = 2'-O-methyluridine
  modified_base 11: mod_base = OTHER; note = 2'-O-methyluridine
  modified_base 16: mod_base = OTHER; note = 2'-O-methylcytidine
  modified_base 17: mod_base = OTHER; note = 2'-O-methyladenosine
  modified_base 18: mod_base = OTHER; note = 2'-O-methylguanosine
  modified_base 19: mod_base = OTHER; note = 2'-O-methylguanosine
  modified_base 20: mod_base = OTHER; note = 2'-O-methyladenosine
  modified_base 21: mod_base = OTHER; note = 2'-O-methylcytidine
  modified_base 25: mod_base = OTHER; note = 2'-O-methylcytidine
  modified_base 26: mod_base = OTHER; note = 2'-O-methylguanosine
  modified_base 27: mod_base = OTHER; note = 2'-O-methyluridine
  modified_base 28: mod_base = OTHER; note = 2'-O-methylcytidine
  modified_base 29: mod_base = OTHER; note = 2'-O-methyluridine
  modified_base 30: mod_base = OTHER; note = 2'-O-methyladenosine
  modified_base 31: mod_base = OTHER; note = 2'-O-methylguanosine
  modified_base 39: mod_base = OTHER; note = 2'-O-methyluridine
  modified_base 42: mod_base = OTHER; note = 2'-O-methyluridine
  modified_base 45: mod_base = OTHER; note = 2'-O-methyladenosine
  modified_base 46: mod_base = OTHER; note = 2'-O-methylguanosine
  modified_base 47: mod_base = OTHER; note = 2'-O-methylguanosine
  modified_base 48: mod_base = OTHER; note = 2'-O-methylguanosine
  modified_base 49: mod_base = OTHER; note = 2'-O-methyluridine
  modified_base 50: mod_base = OTHER; note = 2'-O-methylguanosine
  modified_base 51: mod_base = OTHER; note = 2'-O-methyluridine
  modified_base 52: mod_base = OTHER; note = 2'-O-methylguanosine
  modified_base 57: mod_base = OTHER; note = 2'-O-methyladenosine
  modified_base 58: mod_base = OTHER; note = 2'-O-methylcytidine
  modified_base 59: mod_base = OTHER; note = 2'-O-methyluridine
  modified_base 60: mod_base = OTHER; note = 2'-O-methylcytidine
  modified_base 61: mod_base = OTHER; note = 2'-O-methylcytidine
  modified_base 62: mod_base = OTHER; note = 2'-O-methyluridine
  modified_base 64: mod_base = OTHER; note = 2'-O-methyluridine
  modified_base 65: mod_base = OTHER; note = 2'-O-methyluridine
  modified_base 70: mod_base = OTHER; note = 2'-O-methylguanosine
  modified_base 71: mod_base = OTHER; note = 2'-O-methyladenosine
  modified_base 72: mod_base = OTHER; note = 2'-O-methylcytidine
  modified_base 73: mod_base = OTHER; note = 2'-O-methylguanosine
  modified_base 74: mod_base = OTHER; note = 2'-O-methyladenosine
  modified_base 75: mod_base = OTHER; note = 2'-O-methyluridine
  modified_base 76: mod_base = OTHER; note = 2'-O-methylguanosine
  modified_base 77: mod_base = OTHER; note = 2'-O-methyluridine
  modified_base 78: mod_base = OTHER; note = 2'-O-methylcytidine
  modified_base 79: mod_base = OTHER; note = 2'-O-methyluridine
  modified_base 80: mod_base = OTHER; note = 2'-O-methylcytidine
  modified_base 81: mod_base = OTHER; note = 2'-O-methyluridine
  modified_base 82: mod_base = OTHER; note = 2'-O-methyluridine
  modified_base 83: mod_base = OTHER; note = 2'-O-methyladenosine
  modified_base 84: mod_base = OTHER; note = 2'-O-methylcytidine
  modified_base 85: mod_base = OTHER; note = 2'-O-methylguanosine
  modified_base 86: mod_base = OTHER; note = 2'-O-methyladenosine
  modified_base 87: mod_base = OTHER; note = 2'-O-methylguanosine
  modified_base 98: mod_base = OTHER; note = 2'-O-methyladenosine
  modified_base 104: mod_base = OTHER; note = 2'-O-methylcytidine
  modified_base 105: mod_base = OTHER; note = 2'-O-methyladenosine
  modified_base 109: mod_base = OTHER; note = 2'-O-methyluridine
  modified_base 110: mod_base = OTHER; note = 2'-O-methyladenosine
  modified_base 117: mod_base = OTHER; note = 2'-O-methyluridine phosphorothioate
  modified_base 118: mod_base = OTHER; note = 2'-O-methyladenosine phosphorothioate
  modified_base 119: mod_base = OTHER; note = 2'-O-methyladenosine phosphorothioate
  modified_base 120: mod_base = OTHER; note = 2'-O-methyladenosine

SEQ ID NO: 269 - RNA, 120 nt, synthetic construct; identical to SEQ ID NO: 2
  source 1..120: mol_type = other RNA
  modified_base 1: mod_base = OTHER; note = 2'-O-methylguanosine phosphorothioate
  modified_base 2: mod_base = OTHER; note = 2'-O-methyluridine phosphorothioate
  modified_base 3: mod_base = OTHER; note = 2'-O-methyluridine
  modified_base 98: mod_base = OTHER; note = 2'-O-methyladenosine
  modified_base 101: mod_base = OTHER; note = 2'-O-methylcytidine
  modified_base 104: mod_base = OTHER; note = 2'-O-methylcytidine
  modified_base 105: mod_base = OTHER; note = 2'-O-methyladenosine
  modified_base 107: mod_base = OTHER; note = 2'-O-methylcytidine
  modified_base 109: mod_base = OTHER; note = 2'-O-methyluridine
  modified_base 110: mod_base = OTHER; note = 2'-O-methyladenosine
  modified_base 117: mod_base = OTHER; note = 2'-O-methyluridine phosphorothioate
  modified_base 118: mod_base = OTHER; note = 2'-O-methyladenosine phosphorothioate
  modified_base 119: mod_base = OTHER; note = 2'-O-methyladenosine phosphorothioate
  modified_base 120: mod_base = OTHER; note = 2'-O-methyladenosine

SEQ ID NO: 270 - RNA, 120 nt, synthetic construct; identical to SEQ ID NO: 2
  source 1..120: mol_type = other RNA
  modified_base 1: mod_base = OTHER; note = 2'-O-methylguanosine phosphorothioate
  modified_base 2: mod_base = OTHER; note = 2'-O-methyluridine phosphorothioate
  modified_base 3: mod_base = OTHER; note = 2'-O-methyluridine
  modified_base 4: mod_base = OTHER; note = 2'-O-methylcytidine
  modified_base 5: mod_base = OTHER; note = 2'-O-methyluridine
  modified_base 6: mod_base = OTHER; note = 2'-O-methylguanosine
  modified_base 7: mod_base = OTHER; note = 2'-O-methyluridine
  modified_base 11: mod_base = OTHER; note = 2'-O-methyluridine
  modified_base 16: mod_base = OTHER; note = 2'-O-methylcytidine
  modified_base 17: mod_base = OTHER; note = 2'-O-methyladenosine
  modified_base 18: mod_base = OTHER; note = 2'-O-methylguanosine
  modified_base 19: mod_base = OTHER; note = 2'-O-methylguanosine
  modified_base 20: mod_base = OTHER; note = 2'-O-methyladenosine
  modified_base 21: mod_base = OTHER; note = 2'-O-methylcytidine
  modified_base 25: mod_base = OTHER; note = 2'-O-methylcytidine
  modified_base 26: mod_base = OTHER; note = 2'-O-methylguanosine
  modified_base 27: mod_base = OTHER; note = 2'-O-methyluridine
  modified_base 28: mod_base = OTHER; note = 2'-O-methylcytidine
  modified_base 29: mod_base = OTHER; note = 2'-O-methyluridine
  modified_base 30: mod_base = OTHER; note = 2'-O-methyladenosine
  modified_base 31: mod_base = OTHER; note = 2'-O-methylguanosine
  modified_base 33: mod_base = OTHER; note = 2'-O-methyluridine
  modified_base 39: mod_base = OTHER; note = 2'-O-methyluridine
  modified_base 42: mod_base = OTHER; note = 2'-O-methyluridine
  modified_base 45: mod_base = OTHER; note = 2'-O-methyladenosine
  modified_base 46: mod_base = OTHER; note = 2'-O-methylguanosine
  modified_base 47: mod_base = OTHER; note = 2'-O-methylguanosine
  modified_base 48: mod_base = OTHER; note = 2'-O-methylguanosine
  modified_base 49: mod_base = OTHER; note = 2'-O-methyluridine
  modified_base 50: mod_base = OTHER; note = 2'-O-methylguanosine
  modified_base 51: mod_base = OTHER; note = 2'-O-methyluridine
  modified_base 52: mod_base = OTHER; note = 2'-O-methylguanosine
  modified_base 57: mod_base = OTHER; note = 2'-O-methyladenosine
  modified_base 58: mod_base = OTHER; note = 2'-O-methylcytidine
  modified_base 59: mod_base = OTHER; note = 2'-O-methyluridine
  modified_base 60: mod_base = OTHER; note = 2'-O-methylcytidine
  modified_base 61: mod_base = OTHER; note = 2'-O-methylcytidine
  modified_base 62: mod_base = OTHER; note = 2'-O-methyluridine
  modified_base 64: mod_base = OTHER; note = 2'-O-methyluridine
  modified_base 65: mod_base = OTHER; note = 2'-O-methyluridine
  modified_base 70: mod_base = OTHER; note = 2'-O-methylguanosine
  modified_base 71: mod_base = OTHER; note = 2'-O-methyladenosine
  modified_base 72: mod_base = OTHER; note = 2'-O-methylcytidine
  modified_base 73: mod_base = OTHER; note = 2'-O-methylguanosine
  modified_base 74: mod_base = OTHER; note = 2'-O-methyladenosine
  modified_base 75: mod_base = OTHER; note = 2'-O-methyluridine
  modified_base 76: mod_base = OTHER; note = 2'-O-methylguanosine
  modified_base 77: mod_base = OTHER; note = 2'-O-methyluridine
  modified_base 78: mod_base = OTHER; note = 2'-O-methylcytidine
  modified_base 79: mod_base = OTHER; note = 2'-O-methyluridine
  modified_base 80: mod_base = OTHER; note = 2'-O-methylcytidine
  modified_base 81: mod_base = OTHER; note = 2'-O-methyluridine
  modified_base 82: mod_base = OTHER; note = 2'-O-methyluridine
  modified_base 83: mod_base = OTHER; note = 2'-O-methyladenosine
  modified_base 84: mod_base = OTHER; note = 2'-O-methylcytidine
  modified_base 85: mod_base = OTHER; note = 2'-O-methylguanosine
  modified_base 86: mod_base = OTHER; note = 2'-O-methyladenosine
  modified_base 87: mod_base = OTHER; note = 2'-O-methylguanosine
  modified_base 89: mod_base = OTHER; note = 2'-O-methylcytidine
  modified_base 98: mod_base = OTHER; note = 2'-O-methyladenosine
  modified_base 101: mod_base = OTHER; note = 2'-O-methylcytidine
  modified_base 104: mod_base = OTHER; note = 2'-O-methylcytidine
  modified_base 105: mod_base = OTHER; note = 2'-O-methyladenosine
  modified_base 107: mod_base = OTHER; note = 2'-O-methylcytidine
  modified_base 109: mod_base = OTHER; note = 2'-O-methyluridine
  modified_base 110: mod_base = OTHER; note = 2'-O-methyladenosine
  modified_base 117: mod_base = OTHER; note = 2'-O-methyluridine phosphorothioate
  modified_base 118: mod_base = OTHER; note = 2'-O-methyladenosine phosphorothioate
  modified_base 119: mod_base = OTHER; note = 2'-O-methyladenosine phosphorothioate
  modified_base 120: mod_base = OTHER; note = 2'-O-methyladenosine

SEQ ID NO: 271 - RNA, 123 nt, synthetic construct; identical to SEQ ID NO: 4
  source 1..123: mol_type = other RNA
  modified_base 1: mod_base = OTHER; note = 2'-O-methylguanosine phosphorothioate
  modified_base 2: mod_base = OTHER; note = 2'-O-methyluridine phosphorothioate
  modified_base 3: mod_base = OTHER; note = 2'-O-methyluridine
  modified_base 116: mod_base = OTHER; note = 2'-O-methyluridine
  modified_base 117: mod_base = OTHER; note = 2'-O-methyladenosine
  modified_base 118: mod_base = OTHER; note = 2'-O-methyladenosine
  modified_base 119: mod_base = OTHER; note = 2'-O-methyladenosine
  modified_base 120: mod_base = OTHER; note = 2'-O-methyluridine phosphorothioate
  modified_base 121: mod_base = OTHER; note = 2'-O-methyluridine phosphorothioate
  modified_base 122: mod_base = OTHER; note = 2'-O-methyluridine phosphorothioate
  modified_base 123: mod_base = OTHER; note = 2'-O-methyluridine

SEQ ID NO: 272 - RNA, 120 nt, synthetic construct; identical to SEQ ID NO: 5
  source 1..120: mol_type = other RNA
  modified_base 1: mod_base = OTHER; note = 2'-O-methylguanosine phosphorothioate
  modified_base 2: mod_base = OTHER; note = 2'-O-methyluridine phosphorothioate
  modified_base 98: mod_base = OTHER; note = 2'-O-methyladenosine
  modified_base 101: mod_base = OTHER; note = 2'-O-methyluridine
  modified_base 104: mod_base = OTHER; note = 2'-O-methyluridine
  modified_base 105: mod_base = OTHER; note = 2'-O-methylcytidine
  modified_base 108: mod_base = OTHER; note = 2'-O-methyluridine
  modified_base 109: mod_base = OTHER; note = 2'-O-methylguanosine
  modified_base 110: mod_base = OTHER; note = 2'-O-methylguanosine
  modified_base 115: mod_base = OTHER; note = 2'-O-methyluridine
  modified_base 117: mod_base = OTHER; note = 2'-O-methyladenosine phosphorothioate
  modified_base 118: mod_base = OTHER; note = 2'-O-methyluridine phosphorothioate
  modified_base 119: mod_base = OTHER; note = 2'-O-methyluridine phosphorothioate
  modified_base 120: mod_base = OTHER; note = 2'-O-methylcytidine

SEQ ID NO: 273 - RNA, 120 nt, synthetic construct; identical to SEQ ID NO: 5
  source 1..120: mol_type = other RNA
  modified_base 1: mod_base = OTHER; note = 2'-O-methylguanosine phosphorothioate
  modified_base 2: mod_base = OTHER; note = 2'-O-methyluridine phosphorothioate
  modified_base 104: mod_base = OTHER; note = 2'-O-methyluridine
  modified_base 105: mod_base = OTHER; note = 2'-O-methylcytidine
  modified_base 109: mod_base = OTHER; note = 2'-O-methylguanosine
  modified_base 110: mod_base = OTHER; note = 2'-O-methylguanosine
  modified_base 117: mod_base = OTHER; note = 2'-O-methyladenosine phosphorothioate
  modified_base 118: mod_base = OTHER; note = 2'-O-methyluridine phosphorothioate
  modified_base 119: mod_base = OTHER; note = 2'-O-methyluridine phosphorothioate
  modified_base 120: mod_base = OTHER; note = 2'-O-methylcytidine

SEQ ID NO: 274 - RNA, 120 nt, synthetic construct; identical to SEQ ID NO: 5
  source 1..120: mol_type = other RNA
  modified_base 1: mod_base = OTHER; note = 2'-O-methylguanosine phosphorothioate
  modified_base 2: mod_base = OTHER; note = 2'-O-methyluridine phosphorothioate
  modified_base 5: mod_base = OTHER; note = 2'-O-methyluridine
  modified_base 16: mod_base = OTHER; note = 2'-O-methylcytidine
  modified_base 21: mod_base = OTHER; note = 2'-O-methylcytidine
  modified_base 25: mod_base = OTHER; note = 2'-O-methylcytidine
  modified_base 26: mod_base = OTHER; note = 2'-O-methylguanosine
  modified_base 29: mod_base = OTHER; note = 2'-O-methyluridine
  modified_base 30: mod_base = OTHER; note = 2'-O-methyladenosine
  modified_base 44: mod_base = OTHER; note = 2'-O-methylcytidine
  modified_base 45: mod_base = OTHER; note = 2'-O-methyladenosine
  modified_base 49: mod_base = OTHER; note = 2'-O-methyluridine
  modified_base 50: mod_base = OTHER; note = 2'-O-methylguanosine
  modified_base 62: mod_base = OTHER; note = 2'-O-methyluridine
  modified_base 63: mod_base = OTHER; note = 2'-O-methyladenosine
  modified_base 67: mod_base = OTHER; note = 2'-O-methylcytidine
  modified_base 68: mod_base = OTHER; note = 2'-O-methyluridine
  modified_base 69: mod_base = OTHER; note = 2'-O-methylguanosine
  modified_base 72: mod_base = OTHER; note = 2'-O-methylcytidine
  modified_base 75: mod_base = OTHER; note = 2'-O-methyluridine
  modified_base 76: mod_base = OTHER; note = 2'-O-methylguanosine
  modified_base 79: mod_base = OTHER; note = 2'-O-methyluridine
  modified_base 82: mod_base = OTHER; note = 2'-O-methyluridine
  modified_base 83: mod_base = OTHER; note = 2'-O-methyladenosine
  modified_base 84: mod_base = OTHER; note = 2'-O-methylcytidine
  modified_base 117: mod_base = OTHER; note = 2'-O-methyladenosine phosphorothioate
  modified_base 118: mod_base = OTHER; note = 2'-O-methyluridine phosphorothioate
  modified_base 119: mod_base = OTHER; note = 2'-O-methyluridine phosphorothioate
  modified_base 120: mod_base = OTHER; note = 2'-O-methylcytidine

SEQ ID NO: 275 - RNA, 120 nt, synthetic construct; identical to SEQ ID NO: 5
  source 1..120: mol_type = other RNA
  modified_base 1: mod_base = OTHER; note = 2'-O-methylguanosine phosphorothioate
  modified_base 2: mod_base = OTHER; note = 2'-O-methyluridine phosphorothioate
  modified_base 5: mod_base = OTHER; note = 2'-O-methyluridine
  modified_base 16: mod_base = OTHER; note = 2'-O-methylcytidine
  modified_base 21: mod_base = OTHER; note = 2'-O-methylcytidine
  modified_base 25: mod_base = OTHER; note = 2'-O-methylcytidine
  modified_base 26: mod_base = OTHER; note = 2'-O-methylguanosine
  modified_base 29: mod_base = OTHER; note = 2'-O-methyluridine
  modified_base 30: mod_base = OTHER; note = 2'-O-methyladenosine
  modified_base 33: mod_base = OTHER; note = 2'-O-methyluridine
  modified_base 35: mod_base = OTHER; note = 2'-O-methyluridine
  modified_base 37: mod_base = OTHER; note = 2'-O-methyladenosine
  modified_base 39: mod_base = OTHER; note = 2'-O-methyluridine
  modified_base 44: mod_base = OTHER; note = 2'-O-methylcytidine
  modified_base 45: mod_base = OTHER; note = 2'-O-methyladenosine
  modified_base 47: mod_base = OTHER; note = 2'-O-methylguanosine
  modified_base 49: mod_base = OTHER; note = 2'-O-methyluridine
  modified_base 50: mod_base = OTHER; note = 2'-O-methylguanosine
  modified_base 51: mod_base = OTHER; note = 2'-O-methyluridine
  modified_base 62: mod_base = OTHER; note = 2'-O-methyluridine
  modified_base 63: mod_base = OTHER; note = 2'-O-methyladenosine
  modified_base 65: mod_base = OTHER; note = 2'-O-methyluridine
  modified_base 67: mod_base = OTHER; note = 2'-O-methylcytidine
  modified_base 68: mod_base = OTHER; note = 2'-O-methyluridine
  modified_base 69: mod_base = OTHER; note = 2'-O-methylguanosine
  modified_base 72: mod_base = OTHER; note = 2'-O-methylcytidine
  modified_base 75: mod_base = OTHER; note = 2'-O-methyluridine
  modified_base 76: mod_base = OTHER; note = 2'-O-methylguanosine
  modified_base 79: mod_base = OTHER; note = 2'-O-methyluridine
  modified_base 82: mod_base = OTHER; note = 2'-O-methyluridine
  modified_base 83: mod_base = OTHER; note = 2'-O-methyladenosine
  modified_base 84: mod_base = OTHER; note = 2'-O-methylcytidine
  modified_base 86: mod_base = OTHER; note = 2'-O-methyladenosine
  modified_base 87: mod_base = OTHER; note = 2'-O-methylguanosine
  modified_base 89: mod_base = OTHER; note = 2'-O-methylcytidine
  modified_base 92: mod_base = OTHER; note = 2'-O-methyluridine
  modified_base 95: mod_base = OTHER; note = 2'-O-methylcytidine
  modified_base 117: mod_base = OTHER; note = 2'-O-methyladenosine phosphorothioate
  modified_base 118: mod_base = OTHER; note = 2'-O-methyluridine phosphorothioate
  modified_base 119: mod_base = OTHER; note = 2'-O-methyluridine phosphorothioate
  modified_base 120: mod_base = OTHER; note = 2'-O-methylcytidine

SEQ ID NO: 276 - RNA, 120 nt, synthetic construct; identical to SEQ ID NO: 5
  source 1..120: mol_type = other RNA
  modified_base 1: mod_base = OTHER; note = 2'-O-methylguanosine phosphorothioate
  modified_base 2: mod_base = OTHER; note = 2'-O-methyluridine phosphorothioate
  modified_base 4: mod_base = OTHER; note = 2'-O-methylcytidine
  modified_base 5: mod_base = OTHER; note = 2'-O-methyluridine
  modified_base 6: mod_base = OTHER; note = 2'-O-methylguanosine
  modified_base 7: mod_base = OTHER; note = 2'-O-methyluridine
  modified_base 11: mod_base = OTHER; note = 2'-O-methyluridine
  modified_base 16: mod_base = OTHER; note = 2'-O-methylcytidine
  modified_base 17: mod_base = OTHER; note = 2'-O-methyladenosine
  modified_base 18: mod_base = OTHER; note = 2'-O-methylguanosine
  modified_base 19: mod_base = OTHER; note = 2'-O-methylguanosine
  modified_base 20: mod_base = OTHER; note = 2'-O-methyladenosine
  modified_base 21: mod_base = OTHER; note = 2'-O-methylcytidine
  modified_base 25: mod_base = OTHER; note = 2'-O-methylcytidine
  modified_base 26: mod_base = OTHER; note = 2'-O-methylguanosine
  modified_base 27: mod_base = OTHER; note = 2'-O-methyluridine
  modified_base 28: mod_base = OTHER; note = 2'-O-methylcytidine
  modified_base 29: mod_base = OTHER; note = 2'-O-methyluridine
  modified_base 30: mod_base = OTHER; note = 2'-O-methyladenosine
  modified_base 31: mod_base = OTHER; note = 2'-O-methylguanosine
  modified_base 39: mod_base = OTHER; note = 2'-O-methyluridine
  modified_base 42: mod_base = OTHER; note = 2'-O-methyluridine
  modified_base 45: mod_base = OTHER; note = 2'-O-methyladenosine
  modified_base 46: mod_base = OTHER; note = 2'-O-methylguanosine
  modified_base 47: mod_base = OTHER; note = 2'-O-methylguanosine
  modified_base 48: mod_base = OTHER; note = 2'-O-methylguanosine
  modified_base 49: mod_base = OTHER; note = 2'-O-methyluridine
  modified_base 50: mod_base = OTHER; note = 2'-O-methylguanosine
  modified_base 51: mod_base = OTHER; note = 2'-O-methyluridine
  modified_base 52: mod_base = OTHER; note = 2'-O-methylguanosine
  modified_base 57: mod_base = OTHER; note = 2'-O-methyladenosine
  modified_base 58: mod_base = OTHER; note = 2'-O-methylcytidine
  modified_base 59: mod_base = OTHER; note = 2'-O-methyluridine
  modified_base 60: mod_base = OTHER; note = 2'-O-methylcytidine
  modified_base 61: mod_base = OTHER; note = 2'-O-methylcytidine
  modified_base 62: mod_base = OTHER; note = 2'-O-methyluridine
  modified_base 64: mod_base = OTHER; note = 2'-O-methyluridine
  modified_base 65: mod_base = OTHER; note = 2'-O-methyluridine
  modified_base 70: mod_base = OTHER; note = 2'-O-methylguanosine
  modified_base 71: mod_base = OTHER; note = 2'-O-methyladenosine
  modified_base 72: mod_base = OTHER; note = 2'-O-methylcytidine
  modified_base 73: mod_base = OTHER; note = 2'-O-methylguanosine
  modified_base 74: mod_base = OTHER; note = 2'-O-methyladenosine
  modified_base 75: mod_base = OTHER; note = 2'-O-methyluridine
  modified_base 76: mod_base = OTHER; note = 2'-O-methylguanosine
  modified_base 77: mod_base = OTHER; note = 2'-O-methyluridine
  modified_base 78: mod_base = OTHER; note = 2'-O-methylcytidine
  modified_base 79: mod_base = OTHER; note = 2'-O-methyluridine
  modified_base 80: mod_base = OTHER; note = 2'-O-methylcytidine
  modified_base 81: mod_base = OTHER; note = 2'-O-methyluridine
  modified_base 82: mod_base = OTHER; note = 2'-O-methyluridine
  modified_base 83: mod_base = OTHER; note = 2'-O-methyladenosine
  modified_base 84: mod_base = OTHER; note = 2'-O-methylcytidine
  modified_base 85: mod_base = OTHER; note = 2'-O-methylguanosine
  modified_base 86: mod_base = OTHER; note = 2'-O-methyladenosine
  modified_base 87: mod_base = OTHER; note = 2'-O-methylguanosine
  modified_base 117: mod_base = OTHER; note = 2'-O-methyladenosine phosphorothioate
  modified_base 118: mod_base = OTHER; note = 2'-O-methyluridine phosphorothioate
  modified_base 119: mod_base = OTHER; note = 2'-O-methyluridine phosphorothioate
  modified_base 120: mod_base = OTHER; note = 2'-O-methylcytidine

SEQ ID NO: 277 - RNA, 120 nt, synthetic construct; identical to SEQ ID NO: 5
  source 1..120: mol_type = other RNA
  modified_base 1: mod_base = OTHER; note = 2'-O-methylguanosine phosphorothioate
  modified_base 2: mod_base = OTHER; note = 2'-O-methyluridine phosphorothioate
  modified_base 4: mod_base = OTHER; note = 2'-O-methylcytidine
  modified_base 5: mod_base = OTHER; note = 2'-O-methyluridine
  modified_base 6: mod_base = OTHER; note = 2'-O-methylguanosine
  modified_base 7: mod_base = OTHER; note = 2'-O-methyluridine
  modified_base 11: mod_base = OTHER; note = 2'-O-methyluridine
  modified_base 16: mod_base = OTHER; note = 2'-O-methylcytidine
  modified_base 17: mod_base = OTHER; note = 2'-O-methyladenosine
  modified_base 18: mod_base = OTHER; note = 2'-O-methylguanosine
  modified_base 19: mod_base = OTHER; note = 2'-O-methylguanosine
  modified_base 20: mod_base = OTHER; note = 2'-O-methyladenosine
  modified_base 21: mod_base = OTHER; note = 2'-O-methylcytidine
  modified_base 25: mod_base = OTHER; note = 2'-O-methylcytidine
  modified_base 26: mod_base = OTHER; note = 2'-O-methylguanosine
  modified_base 27: mod_base = OTHER; note = 2'-O-methyluridine
  modified_base 28: mod_base = OTHER; note = 2'-O-methylcytidine
  modified_base 29: mod_base = OTHER; note = 2'-O-methyluridine
  modified_base 30: mod_base = OTHER; note = 2'-O-methyladenosine
  modified_base 31: mod_base = OTHER; note = 2'-O-methylguanosine
  modified_base 45: mod_base = OTHER; note = 2'-O-methyladenosine
  modified_base 46: mod_base = OTHER; note = 2'-O-methylguanosine
  modified_base 47: mod_base = OTHER; note = 2'-O-methylguanosine
  modified_base 48: mod_base = OTHER; note = 2'-O-methylguanosine
  modified_base 49: mod_base = OTHER; note = 2'-O-methyluridine
  modified_base 50: mod_base = OTHER; note = 2'-O-methylguanosine
  modified_base 51: mod_base = OTHER; note = 2'-O-methyluridine
  modified_base 52: mod_base = OTHER; note = 2'-O-methylguanosine
  modified_base 57: mod_base = OTHER; note = 2'-O-methyladenosine
  modified_base 58: mod_base = OTHER; note = 2'-O-methylcytidine
  modified_base 59: mod_base = OTHER; note = 2'-O-methyluridine
  modified_base 60: mod_base = OTHER; note = 2'-O-methylcytidine
  modified_base 61: mod_base = OTHER; note = 2'-O-methylcytidine
  modified_base 62: mod_base = OTHER; note = 2'-O-methyluridine
  modified_base 64: mod_base = OTHER; note = 2'-O-methyluridine
  modified_base 65: mod_base = OTHER; note = 2'-O-methyluridine
  modified_base 70: mod_base = OTHER; note = 2'-O-methylguanosine
  modified_base 71: mod_base = OTHER; note = 2'-O-methyladenosine
  modified_base 72: mod_base = OTHER; note = 2'-O-methylcytidine
  modified_base 73: mod_base = OTHER; note = 2'-O-methylguanosine
  modified_base 74: mod_base = OTHER; note = 2'-O-methyladenosine
  modified_base 75: mod_base = OTHER; note = 2'-O-methyluridine
  modified_base 76: mod_base = OTHER; note = 2'-O-methylguanosine
  modified_base 77: mod_base = OTHER; note = 2'-O-methyluridine
  modified_base 78: mod_base = OTHER; note = 2'-O-methylcytidine
  modified_base 79: mod_base = OTHER; note = 2'-O-methyluridine
  modified_base 80: mod_base = OTHER; note = 2'-O-methylcytidine
  modified_base 81: mod_base = OTHER; note = 2'-O-methyluridine
  modified_base 82: mod_base = OTHER; note = 2'-O-methyluridine
  modified_base 83: mod_base = OTHER; note = 2'-O-methyladenosine
  modified_base 84: mod_base = OTHER; note = 2'-O-methylcytidine
  modified_base 85: mod_base = OTHER; note = 2'-O-methylguanosine
  modified_base 86: mod_base = OTHER; note = 2'-O-methyladenosine
  modified_base 87: mod_base = OTHER; note = 2'-O-methylguanosine
  modified_base 117: mod_base = OTHER; note = 2'-O-methyladenosine phosphorothioate
  modified_base 118: mod_base = OTHER; note = 2'-O-methyluridine phosphorothioate
  modified_base 119: mod_base = OTHER; note = 2'-O-methyluridine phosphorothioate
  modified_base 120: mod_base = OTHER; note = 2'-O-methylcytidine

SEQ ID NO: 278 - RNA, 120 nt, synthetic construct; identical to SEQ ID NO: 5
  source 1..120: mol_type = other RNA
  modified_base 1: mod_base = OTHER; note = 2'-O-methylguanosine phosphorothioate
  modified_base 2: mod_base = OTHER; note = 2'-O-methyluridine phosphorothioate
  modified_base 25: mod_base = OTHER; note = 2'-O-methylcytidine
  modified_base 26: mod_base = OTHER; note = 2'-O-methylguanosine
  modified_base 27: mod_base = OTHER; note = 2'-O-methyluridine
  modified_base 28: mod_base = OTHER; note = 2'-O-methylcytidine
  modified_base 29: mod_base = OTHER; note = 2'-O-methyluridine
  modified_base 30: mod_base = OTHER; note = 2'-O-methyladenosine
  modified_base 31: mod_base = OTHER; note = 2'-O-methylguanosine
  modified_base 39: mod_base = OTHER; note = 2'-O-methyluridine
  modified_base 42: mod_base = OTHER; note = 2'-O-methyluridine
  modified_base 45: mod_base = OTHER; note = 2'-O-methyladenosine
  modified_base 46: mod_base = OTHER; note = 2'-O-methylguanosine
  modified_base 47: mod_base = OTHER; note = 2'-O-methylguanosine
  modified_base 48: mod_base = OTHER; note = 2'-O-methylguanosine
  modified_base 49: mod_base = OTHER; note = 2'-O-methyluridine
  modified_base 50: mod_base = OTHER; note = 2'-O-methylguanosine
  modified_base 51: mod_base = OTHER; note = 2'-O-methyluridine
  modified_base 52: mod_base = OTHER; note = 2'-O-methylguanosine
  modified_base 57: mod_base = OTHER; note = 2'-O-methyladenosine
  modified_base 58: mod_base = OTHER; note = 2'-O-methylcytidine
  modified_base 59: mod_base = OTHER; note = 2'-O-methyluridine
  modified_base 60: mod_base = OTHER; note = 2'-O-methylcytidine
  modified_base 61: mod_base = OTHER; note = 2'-O-methylcytidine
  modified_base 62: mod_base = OTHER; note = 2'-O-methyluridine
  modified_base 64: mod_base = OTHER; note = 2'-O-methyluridine
  modified_base 65: mod_base = OTHER; note = 2'-O-methyluridine
  modified_base 70: mod_base = OTHER; note = 2'-O-methylguanosine
  modified_base 71: mod_base = OTHER; note = 2'-O-methyladenosine
  modified_base 72: mod_base = OTHER; note = 2'-O-methylcytidine
  modified_base 73: mod_base = OTHER; note = 2'-O-methylguanosine
  modified_base 74: mod_base = OTHER; note = 2'-O-methyladenosine
  modified_base 75: mod_base = OTHER; note = 2'-O-methyluridine
  modified_base 76: mod_base = OTHER; note = 2'-O-methylguanosine
  modified_base 77: mod_base = OTHER; note = 2'-O-methyluridine
  modified_base 78: mod_base = OTHER; note = 2'-O-methylcytidine
  modified_base 79: mod_base = OTHER; note = 2'-O-methyluridine
  modified_base 80: mod_base = OTHER; note = 2'-O-methylcytidine
  modified_base 81: mod_base = OTHER; note = 2'-O-methyluridine
  modified_base 82: mod_base = OTHER; note = 2'-O-methyluridine
  modified_base 83: mod_base = OTHER; note = 2'-O-methyladenosine
  modified_base 84: mod_base = OTHER; note = 2'-O-methylcytidine
  modified_base 85: mod_base = OTHER; note = 2'-O-methylguanosine
  modified_base 86: mod_base = OTHER; note = 2'-O-methyladenosine
  modified_base 87: mod_base = OTHER; note = 2'-O-methylguanosine
  modified_base 117: mod_base = OTHER; note = 2'-O-methyladenosine phosphorothioate
  modified_base 118: mod_base = OTHER; note = 2'-O-methyluridine phosphorothioate
  modified_base 119: mod_base = OTHER; note = 2'-O-methyluridine phosphorothioate
  modified_base 120: mod_base = OTHER; note = 2'-O-methylcytidine

SEQ ID NO: 279 - RNA, 120 nt, synthetic construct; identical to SEQ ID NO: 5
  source 1..120: mol_type = other RNA
  modified_base 1: mod_base = OTHER; note = 2'-O-methylguanosine phosphorothioate
  modified_base 2: mod_base = OTHER; note = 2'-O-methyluridine phosphorothioate
  modified_base 4: mod_base = OTHER; note = 2'-O-methylcytidine
  modified_base 5: mod_base = OTHER; note = 2'-O-methyluridine
  modified_base 6: mod_base = OTHER; note = 2'-O-methylguanosine
  modified_base 7: mod_base = OTHER; note = 2'-O-methyluridine
  modified_base 11: mod_base = OTHER; note = 2'-O-methyluridine
  modified_base 16: mod_base = OTHER; note = 2'-O-methylcytidine
  modified_base 17: mod_base = OTHER; note = 2'-O-methyladenosine
  modified_base 18: mod_base = OTHER; note = 2'-O-methylguanosine
  modified_base 19: mod_base = OTHER; note = 2'-O-methylguanosine
  modified_base 20: mod_base = OTHER; note = 2'-O-methyladenosine
  modified_base 21: mod_base = OTHER; note = 2'-O-methylcytidine
  modified_base 25: mod_base = OTHER; note = 2'-O-methylcytidine
  modified_base 26: mod_base = OTHER; note = 2'-O-methylguanosine
  modified_base 27: mod_base = OTHER; note = 2'-O-methyluridine
  modified_base 28: mod_base = OTHER; note = 2'-O-methylcytidine
  modified_base 29: mod_base = OTHER; note = 2'-O-methyluridine
  modified_base 30: mod_base = OTHER; note = 2'-O-methyladenosine
  modified_base 31: mod_base = OTHER; note = 2'-O-methylguanosine
  modified_base 39: mod_base = OTHER; note = 2'-O-methyluridine
  modified_base 42: mod_base = OTHER; note = 2'-O-methyluridine
  modified_base 64: mod_base = OTHER; note = 2'-O-methyluridine
  modified_base 65: mod_base = OTHER; note = 2'-O-methyluridine
  modified_base 70: mod_base = OTHER; note = 2'-O-methylguanosine
  modified_base 71: mod_base = OTHER; note = 2'-O-methyladenosine
  modified_base 72: mod_base = OTHER; note = 2'-O-methylcytidine
  modified_base 73: mod_base = OTHER; note = 2'-O-methylguanosine
  modified_base 74: mod_base = OTHER; note = 2'-O-methyladenosine
  modified_base 75: mod_base = OTHER; note = 2'-O-methyluridine
  modified_base 76: mod_base = OTHER; note = 2'-O-methylguanosine
  modified_base 77: mod_base = OTHER; note = 2'-O-methyluridine
  modified_base 78: mod_base = OTHER; note = 2'-O-methylcytidine
  modified_base 79: mod_base = OTHER; note = 2'-O-methyluridine
  modified_base 80: mod_base = OTHER; note = 2'-O-methylcytidine
  modified_base 81: mod_base = OTHER; note = 2'-O-methyluridine
  modified_base 82: mod_base = OTHER; note = 2'-O-methyluridine
  modified_base 83: mod_base = OTHER; note = 2'-O-methyladenosine
  modified_base 84: mod_base = OTHER; note = 2'-O-methylcytidine
  modified_base 85: mod_base = OTHER; note = 2'-O-methylguanosine
  modified_base 86: mod_base = OTHER; note = 2'-O-methyladenosine
  modified_base 87: mod_base = OTHER; note = 2'-O-methylguanosine
  modified_base 117: mod_base = OTHER; note = 2'-O-methyladenosine phosphorothioate
  modified_base 118: mod_base = OTHER; note = 2'-O-methyluridine phosphorothioate
  modified_base 119: mod_base = OTHER; note = 2'-O-methyluridine phosphorothioate
  modified_base 120: mod_base = OTHER; note = 2'-O-methylcytidine

SEQ ID NO: 280 - RNA, 120 nt, synthetic construct; identical to SEQ ID NO: 5
  source 1..120: mol_type = other RNA
  modified_base 1: mod_base = OTHER; note = 2'-O-methylguanosine phosphorothioate
  modified_base 2: mod_base = OTHER; note = 2'-O-methyluridine phosphorothioate
  modified_base 98: mod_base = OTHER; note = 2'-O-methyladenosine
  modified_base 104: mod_base = OTHER; note = 2'-O-methyluridine
  modified_base 105: mod_base = OTHER; note = 2'-O-methylcytidine
  modified_base 109: mod_base = OTHER; note = 2'-O-methylguanosine
  modified_base 110: mod_base = OTHER; note = 2'-O-methylguanosine
  modified_base 117: mod_base = OTHER; note = 2'-O-methyladenosine phosphorothioate
  modified_base 118: mod_base = OTHER; note = 2'-O-methyluridine phosphorothioate
  modified_base 119: mod_base = OTHER; note = 2'-O-methyluridine phosphorothioate
  modified_base 120: mod_base = OTHER; note = 2'-O-methylcytidine

SEQ ID NO: 281 - RNA, 120 nt, synthetic construct; identical to SEQ ID NO: 5
  source 1..120: mol_type = other RNA
  modified_base 1: mod_base = OTHER; note = 2'-O-methylguanosine phosphorothioate
  modified_base 2: mod_base = OTHER; note = 2'-O-methyluridine phosphorothioate
  modified_base 4: mod_base = OTHER; note = 2'-O-methylcytidine
  modified_base 5: mod_base = OTHER; note = 2'-O-methyluridine
  modified_base 6: mod_base = OTHER; note = 2'-O-methylguanosine
  modified_base 7: mod_base = OTHER; note = 2'-O-methyluridine
  modified_base 11: mod_base = OTHER; note = 2'-O-methyluridine
  modified_base 16: mod_base = OTHER; note = 2'-O-methylcytidine
  modified_base 17: mod_base = OTHER; note = 2'-O-methyladenosine
  modified_base 18: mod_base = OTHER; note = 2'-O-methylguanosine
  modified_base 19: mod_base = OTHER; note = 2'-O-methylguanosine
  modified_base 20: mod_base = OTHER; note = 2'-O-methyladenosine
  modified_base 21: mod_base = OTHER; note = 2'-O-methylcytidine
  modified_base 25: mod_base = OTHER; note = 2'-O-methylcytidine
  modified_base 26: mod_base = OTHER; note = 2'-O-methylguanosine
  modified_base 27: mod_base = OTHER; note = 2'-O-methyluridine
  modified_base 28: mod_base = OTHER; note = 2'-O-methylcytidine
  modified_base 29: mod_base = OTHER; note = 2'-O-methyluridine
  modified_base 30: mod_base = OTHER; note = 2'-O-methyladenosine
  modified_base 31: mod_base = OTHER; note = 2'-O-methylguanosine
  modified_base 39: mod_base = OTHER; note = 2'-O-methyluridine
  modified_base 42: mod_base = OTHER; note = 2'-O-methyluridine
  modified_base 45: mod_base = OTHER; note = 2'-O-methyladenosine
  modified_base 46: mod_base = OTHER; note = 2'-O-methylguanosine
  modified_base 47: mod_base = OTHER; note = 2'-O-methylguanosine
  modified_base 48: mod_base = OTHER; note = 2'-O-methylguanosine
  modified_base 49: mod_base = OTHER; note = 2'-O-methyluridine
  modified_base 50: mod_base = OTHER; note = 2'-O-methylguanosine
  modified_base 51: mod_base = OTHER; note = 2'-O-methyluridine
  modified_base 52: mod_base = OTHER; note = 2'-O-methylguanosine
  modified_base 57: mod_base = OTHER; note = 2'-O-methyladenosine
  modified_base 58: mod_base = OTHER; note = 2'-O-methylcytidine
  modified_base 59: mod_base = OTHER; note = 2'-O-methyluridine
  modified_base 60: mod_base = OTHER; note = 2'-O-methylcytidine
  modified_base 61: mod_base = OTHER; note = 2'-O-methylcytidine
  modified_base 62: mod_base = OTHER; note = 2'-O-methyluridine
  modified_base 64: mod_base = OTHER; note = 2'-O-methyluridine
  modified_base 65: mod_base = OTHER; note = 2'-O-methyluridine
  modified_base 70: mod_base = OTHER; note = 2'-O-methylguanosine
  modified_base 71: mod_base = OTHER; note = 2'-O-methyladenosine
  modified_base 72: mod_base = OTHER; note = 2'-O-methylcytidine
  modified_base 73: mod_base = OTHER; note = 2'-O-methylguanosine
  modified_base 74: mod_base = OTHER; note = 2'-O-methyladenosine
  modified_base 75: mod_base = OTHER; note = 2'-O-methyluridine
  modified_base 76: mod_base = OTHER; note = 2'-O-methylguanosine
  modified_base 77: mod_base = OTHER; note = 2'-O-methyluridine
  modified_base 78: mod_base = OTHER; note = 2'-O-methylcytidine
  modified_base 79: mod_base = OTHER; note = 2'-O-methyluridine
  modified_base 80: mod_base = OTHER; note = 2'-O-methylcytidine
  modified_base 81: mod_base = OTHER; note = 2'-O-methyluridine
  modified_base 82: mod_base = OTHER; note = 2'-O-methyluridine
  modified_base 83: mod_base = OTHER; note = 2'-O-methyladenosine
  modified_base 84: mod_base = OTHER; note = 2'-O-methylcytidine
  modified_base 85: mod_base = OTHER; note = 2'-O-methylguanosine
  modified_base 86: mod_base = OTHER; note = 2'-O-methyladenosine
  modified_base 87: mod_base = OTHER; note = 2'-O-methylguanosine
  modified_base 98: mod_base = OTHER; note = 2'-O-methyladenosine
  modified_base 104: mod_base = OTHER; note = 2'-O-methyluridine
  modified_base 105: mod_base = OTHER; note = 2'-O-methylcytidine
  modified_base 109: mod_base = OTHER; note = 2'-O-methylguanosine
  modified_base 110: mod_base = OTHER; note = 2'-O-methylguanosine
  modified_base 117: mod_base = OTHER; note = 2'-O-methyladenosine phosphorothioate
  modified_base 118: mod_base = OTHER; note = 2'-O-methyluridine phosphorothioate
  modified_base 119: mod_base = OTHER; note = 2'-O-methyluridine phosphorothioate
  modified_base 120: mod_base = OTHER; note = 2'-O-methylcytidine

SEQ ID NO: 282 - RNA, 120 nt, synthetic construct; identical to SEQ ID NO: 5
  source 1..120: mol_type = other RNA
  modified_base 1: mod_base = OTHER; note = 2'-O-methylguanosine phosphorothioate
  modified_base 2: mod_base = OTHER; note = 2'-O-methyluridine phosphorothioate
  modified_base 4: mod_base = OTHER; note = 2'-O-methylcytidine
  modified_base 5: mod_base = OTHER; note = 2'-O-methyluridine
  modified_base 6: mod_base = OTHER; note = 2'-O-methylguanosine
  modified_base 7: mod_base = OTHER; note = 2'-O-methyluridine
  modified_base 11: mod_base = OTHER; note = 2'-O-methyluridine
  modified_base 16: mod_base = OTHER; note = 2'-O-methylcytidine
  modified_base 17: mod_base = OTHER; note = 2'-O-methyladenosine
  modified_base 18: mod_base = OTHER; note = 2'-O-methylguanosine
  modified_base 19: mod_base = OTHER; note = 2'-O-methylguanosine
  modified_base 20: mod_base = OTHER; note = 2'-O-methyladenosine
  modified_base 21: mod_base = OTHER; note = 2'-O-methylcytidine
  modified_base 25: mod_base = OTHER; note = 2'-O-methylcytidine
  modified_base 26: mod_base = OTHER; note = 2'-O-methylguanosine
  modified_base 27: mod_base = OTHER; note = 2'-O-methyluridine
  modified_base 28: mod_base = OTHER; note = 2'-O-methylcytidine
  modified_base 29: mod_base = OTHER; note = 2'-O-methyluridine
  modified_base 30: mod_base = OTHER; note = 2'-O-methyladenosine
  modified_base 31: mod_base = OTHER; note = 2'-O-methylguanosine
  modified_base 39: mod_base = OTHER; note = 2'-O-methyluridine
  modified_base 42: mod_base = OTHER; note = 2'-O-methyluridine
  modified_base 45: mod_base = OTHER; note = 2'-O-methyladenosine
  modified_base 46: mod_base = OTHER; note = 2'-O-methylguanosine
  modified_base 47: mod_base = OTHER; note = 2'-O-methylguanosine
  modified_base 48: mod_base = OTHER; note = 2'-O-methylguanosine
  modified_base 49: mod_base = OTHER; note = 2'-O-methyluridine
  modified_base 50: mod_base = OTHER; note = 2'-O-methylguanosine
  modified_base 51: mod_base = OTHER; note = 2'-O-methyluridine
  modified_base 52: mod_base = OTHER; note = 2'-O-methylguanosine
  modified_base 57: mod_base = OTHER; note = 2'-O-methyladenosine
  modified_base 58: mod_base = OTHER; note = 2'-O-methylcytidine
  modified_base 59: mod_base = OTHER; note = 2'-O-methyluridine
  modified_base 60: mod_base = OTHER; note = 2'-O-methylcytidine
  modified_base 61: mod_base = OTHER; note = 2'-O-methylcytidine
  modified_base 62: mod_base = OTHER; note = 2'-O-methyluridine
  modified_base 64: mod_base = OTHER; note = 2'-O-methyluridine
  modified_base 65: mod_base = OTHER; note = 2'-O-methyluridine
  modified_base 70: mod_base = OTHER; note = 2'-O-methylguanosine
  modified_base 71: mod_base = OTHER; note = 2'-O-methyladenosine
  modified_base 72: mod_base = OTHER; note = 2'-O-methylcytidine
  modified_base 73: mod_base = OTHER; note = 2'-O-methylguanosine
  modified_base 74: mod_base = OTHER; note = 2'-O-methyladenosine
  modified_base 75: mod_base = OTHER; note = 2'-O-methyluridine
  modified_base 76: mod_base = OTHER; note = 2'-O-methylguanosine
  modified_base 77: mod_base = OTHER; note = 2'-O-methyluridine
  modified_base 78: mod_base = OTHER; note = 2'-O-methylcytidine
  modified_base 79: mod_base = OTHER; note = 2'-O-methyluridine
  modified_base 80: mod_base = OTHER; note = 2'-O-methylcytidine
  modified_base 81: mod_base = OTHER; note = 2'-O-methyluridine
  modified_base 82: mod_base = OTHER; note = 2'-O-methyluridine
  modified_base 83: mod_base = OTHER; note = 2'-O-methyladenosine
  modified_base 84: mod_base = OTHER; note = 2'-O-methylcytidine
  modified_base 85: mod_base = OTHER; note = 2'-O-methylguanosine
  modified_base 86: mod_base = OTHER; note = 2'-O-methyladenosine
  modified_base 87: mod_base = OTHER; note = 2'-O-methylguanosine
  modified_base 98: mod_base = OTHER; note = 2'-O-methyladenosine
  modified_base 101: mod_base = OTHER; note = 2'-O-methyluridine
  modified_base 104: mod_base = OTHER; note = 2'-O-methyluridine
  modified_base 105: mod_base = OTHER; note = 2'-O-methylcytidine
  modified_base 108: mod_base = OTHER; note = 2'-O-methyluridine
  modified_base 109: mod_base = OTHER; note = 2'-O-methylguanosine
  modified_base 110: mod_base = OTHER; note = 2'-O-methylguanosine
  modified_base 115: mod_base = OTHER; note = 2'-O-methyluridine
  modified_base 117: mod_base = OTHER; note = 2'-O-methyladenosine phosphorothioate
  modified_base 118: mod_base = OTHER; note = 2'-O-methyluridine phosphorothioate
  modified_base 119: mod_base = OTHER; note = 2'-O-methyluridine phosphorothioate
  modified_base 120: mod_base = OTHER; note = 2'-O-methylcytidine

SEQ ID NO: 283 - RNA, 120 nt, synthetic construct; identical to SEQ ID NO: 5
  source 1..120: mol_type = other RNA
  modified_base 1: mod_base = OTHER; note = 2'-O-methylguanosine phosphorothioate
  modified_base 2: mod_base = OTHER; note = 2'-O-methyluridine phosphorothioate
  modified_base 4: mod_base = OTHER; note = 2'-O-methylcytidine
  modified_base 5: mod_base = OTHER; note = 2'-O-methyluridine
  modified_base 6: mod_base = OTHER; note = 2'-O-methylguanosine
  modified_base 7: mod_base = OTHER; note = 2'-O-methyluridine
  modified_base 11: mod_base = OTHER; note = 2'-O-methyluridine
  modified_base 16: mod_base = OTHER; note = 2'-O-methylcytidine
  modified_base 17: mod_base = OTHER; note = 2'-O-methyladenosine
  modified_base 18: mod_base = OTHER; note = 2'-O-methylguanosine
  modified_base 19: mod_base = OTHER; note = 2'-O-methylguanosine
  modified_base 20: mod_base = OTHER; note = 2'-O-methyladenosine
  modified_base 21: mod_base = OTHER; note = 2'-O-methylcytidine
  modified_base 25: mod_base = OTHER; note = 2'-O-methylcytidine
  modified_base 26: mod_base = OTHER; note = 2'-O-methylguanosine
  modified_base 27: mod_base = OTHER; note = 2'-O-methyluridine
  modified_base 28: mod_base = OTHER; note = 2'-O-methylcytidine
  modified_base 29: mod_base = OTHER; note = 2'-O-methyluridine
  modified_base 30: mod_base = OTHER; note = 2'-O-methyladenosine
  modified_base 31: mod_base = OTHER; note = 2'-O-methylguanosine
  modified_base 33: mod_base = OTHER; note = 2'-O-methyluridine
  modified_base 39: mod_base = OTHER; note = 2'-O-methyluridine
  modified_base 42: mod_base = OTHER; note = 2'-O-methyluridine
  modified_base 45: mod_base = OTHER; note = 2'-O-methyladenosine
  modified_base 46: mod_base = OTHER; note = 2'-O-methylguanosine
  modified_base 47: mod_base = OTHER; note = 2'-O-methylguanosine
  modified_base 48: mod_base = OTHER; note = 2'-O-methylguanosine
  modified_base 49: mod_base = OTHER; note = 2'-O-methyluridine
  modified_base 50: mod_base = OTHER; note = 2'-O-methylguanosine
  modified_base 51: mod_base = OTHER; note = 2'-O-methyluridine
  modified_base 52: mod_base = OTHER; note = 2'-O-methylguanosine
  modified_base 57: mod_base = OTHER; note = 2'-O-methyladenosine
  modified_base 58: mod_base = OTHER; note = 2'-O-methylcytidine
  modified_base 59: mod_base = OTHER; note = 2'-O-methyluridine
  modified_base 60: mod_base = OTHER; note = 2'-O-methylcytidine
  modified_base 61: mod_base = OTHER; note = 2'-O-methylcytidine
  modified_base 62: mod_base = OTHER; note = 2'-O-methyluridine
  modified_base 64: mod_base = OTHER; note = 2'-O-methyluridine
  modified_base 65: mod_base = OTHER; note = 2'-O-methyluridine
  modified_base 70: mod_base = OTHER; note = 2'-O-methylguanosine
  modified_base 71: mod_base = OTHER; note = 2'-O-methyladenosine
  modified_base 72: mod_base = OTHER; note = 2'-O-methylcytidine
  modified_base 73: mod_base = OTHER; note = 2'-O-methylguanosine
  modified_base 74: mod_base = OTHER; note = 2'-O-methyladenosine
  modified_base 75: mod_base = OTHER; note = 2'-O-methyluridine
  modified_base 76: mod_base = OTHER; note = 2'-O-methylguanosine
  modified_base 77: mod_base = OTHER; note = 2'-O-methyluridine
  modified_base 78: mod_base = OTHER; note = 2'-O-methylcytidine
  modified_base 79: mod_base = OTHER; note = 2'-O-methyluridine
  modified_base 80: mod_base = OTHER; note = 2'-O-methylcytidine
  modified_base 81: mod_base = OTHER; note = 2'-O-methyluridine
  modified_base 82: mod_base = OTHER; note = 2'-O-methyluridine
  modified_base 83: mod_base = OTHER; note = 2'-O-methyladenosine
  modified_base 84: mod_base = OTHER; note = 2'-O-methylcytidine
  modified_base 85: mod_base = OTHER; note = 2'-O-methylguanosine
  modified_base 86: mod_base = OTHER; note = 2'-O-methyladenosine
  modified_base 87: mod_base = OTHER; note = 2'-O-methylguanosine
  modified_base 89: mod_base = OTHER; note = 2'-O-methylcytidine
  modified_base 98: mod_base = OTHER; note = 2'-O-methyladenosine
  modified_base 101: mod_base = OTHER; note = 2'-O-methyluridine
  modified_base 104: mod_base = OTHER; note = 2'-O-methyluridine
  modified_base 105: mod_base = OTHER; note = 2'-O-methylcytidine
  modified_base 108: mod_base = OTHER; note = 2'-O-methyluridine
  modified_base 109: mod_base = OTHER; note = 2'-O-methylguanosine
  modified_base 110: mod_base = OTHER; note = 2'-O-methylguanosine
  modified_base 115: mod_base = OTHER; note = 2'-O-methyluridine
  modified_base 117: mod_base = OTHER; note = 2'-O-methyladenosine phosphorothioate
  modified_base 118: mod_base = OTHER; note = 2'-O-methyluridine phosphorothioate
  modified_base 119: mod_base = OTHER; note = 2'-O-methyluridine phosphorothioate
  modified_base 120: mod_base = OTHER; note = 2'-O-methylcytidine

SEQ ID NO: 284 - RNA, 120 nt, synthetic construct; identical to SEQ ID NO: 5
  source 1..120: mol_type = other RNA
  modified_base 1: mod_base = OTHER; note = 2'-O-methylguanosine phosphorothioate
  modified_base 2: mod_base = OTHER; note = 2'-O-methyluridine phosphorothioate
  modified_base 3: mod_base = OTHER; note = 2'-O-methyluridine
  modified_base 117: mod_base = OTHER; note = 2'-O-methyladenosine phosphorothioate
  modified_base 118: mod_base = OTHER; note = 2'-O-methyluridine phosphorothioate
  modified_base 119: mod_base = OTHER; note = 2'-O-methyluridine phosphorothioate
  modified_base 120: mod_base = OTHER; note = 2'-O-methylcytidine

SEQ ID NO: 285 - RNA, 120 nt, synthetic construct; identical to SEQ ID NO: 5
  source 1..120: mol_type = other RNA
  modified_base 1: mod_base = OTHER; note = 2'-O-methylguanosine phosphorothioate
  modified_base 2: mod_base = OTHER; note = 2'-O-methyluridine phosphorothioate
  modified_base 3: mod_base = OTHER; note = 2'-O-methyluridine
  modified_base 98: mod_base = OTHER; note = 2'-O-methyladenosine
  modified_base 101: mod_base = OTHER; note = 2'-O-methyluridine
  modified_base 104: mod_base = OTHER; note = 2'-O-methyluridine
  modified_base 105: mod_base = OTHER; note = 2'-O-methylcytidine
  modified_base 108: mod_base = OTHER; note = 2'-O-methyluridine
  modified_base 109: mod_base = OTHER; note = 2'-O-methylguanosine
  modified_base 110: mod_base = OTHER; note = 2'-O-methylguanosine
  modified_base 115: mod_base = OTHER; note = 2'-O-methyluridine
  modified_base 117: mod_base = OTHER; note = 2'-O-methyladenosine phosphorothioate
  modified_base 118: mod_base = OTHER; note = 2'-O-methyluridine phosphorothioate
  modified_base 119: mod_base = OTHER; note = 2'-O-methyluridine phosphorothioate
  modified_base 120: mod_base = OTHER; note = 2'-O-methylcytidine

SEQ ID NO: 286 - RNA, 120 nt, synthetic construct; identical to SEQ ID NO: 5
  source 1..120: mol_type = other RNA
  modified_base 1: mod_base = OTHER; note = 2'-O-methylguanosine phosphorothioate
  modified_base 2: mod_base = OTHER; note = 2'-O-methyluridine phosphorothioate
  modified_base 3: mod_base = OTHER; note = 2'-O-methyluridine
  modified_base 104: mod_base = OTHER; note = 2'-O-methyluridine
  modified_base 105: mod_base = OTHER; note = 2'-O-methylcytidine
  modified_base 109: mod_base = OTHER; note = 2'-O-methylguanosine
  modified_base 110: mod_base = OTHER; note = 2'-O-methylguanosine
  modified_base 117: mod_base = OTHER; note = 2'-O-methyladenosine phosphorothioate
  modified_base 118: mod_base = OTHER; note = 2'-O-methyluridine phosphorothioate
  modified_base 119: mod_base = OTHER; note = 2'-O-methyluridine phosphorothioate
  modified_base 120: mod_base = OTHER; note = 2'-O-methylcytidine

SEQ ID NO: 287 - RNA, 120 nt, synthetic construct; identical to SEQ ID NO: 5
  source 1..120: mol_type = other RNA
  modified_base 1: mod_base = OTHER; note = 2'-O-methylguanosine phosphorothioate
  modified_base 2: mod_base = OTHER; note = 2'-O-methyluridine phosphorothioate
  modified_base 3: mod_base = OTHER; note = 2'-O-methyluridine
  modified_base 5: mod_base = OTHER; note = 2'-O-methyluridine
  modified_base 16: mod_base = OTHER; note = 2'-O-methylcytidine
  modified_base 21: mod_base = OTHER; note = 2'-O-methylcytidine
  modified_base 25: mod_base = OTHER; note = 2'-O-methylcytidine
  modified_base 26: mod_base = OTHER; note = 2'-O-methylguanosine
  modified_base 29: mod_base = OTHER; note = 2'-O-methyluridine
  modified_base 30: mod_base = OTHER; note = 2'-O-methyladenosine
  modified_base 44: mod_base = OTHER; note = 2'-O-methylcytidine
  modified_base 45: mod_base = OTHER; note = 2'-O-methyladenosine
  modified_base 49: mod_base = OTHER; note = 2'-O-methyluridine
  modified_base 50: mod_base = OTHER; note = 2'-O-methylguanosine
  modified_base 62: mod_base = OTHER; note = 2'-O-methyluridine
  modified_base 63: mod_base = OTHER; note = 2'-O-methyladenosine
  modified_base 67: mod_base = OTHER; note = 2'-O-methylcytidine
  modified_base 68: mod_base = OTHER; note = 2'-O-methyluridine
  modified_base 69: mod_base = OTHER; note = 2'-O-methylguanosine
  modified_base 72: mod_base = OTHER; note = 2'-O-methylcytidine
  modified_base 75: mod_base = OTHER; note = 2'-O-methyluridine
  modified_base 76: mod_base = OTHER; note = 2'-O-methylguanosine
  modified_base 79: mod_base = OTHER; note = 2'-O-methyluridine
  modified_base 82: mod_base = OTHER; note = 2'-O-methyluridine
  modified_base 83: mod_base = OTHER; note = 2'-O-methyladenosine
  modified_base 84: mod_base = OTHER; note = 2'-O-methylcytidine
  modified_base 117: mod_base = OTHER; note = 2'-O-methyladenosine phosphorothioate
  modified_base 118: mod_base = OTHER; note = 2'-O-methyluridine phosphorothioate
  modified_base 119: mod_base = OTHER; note = 2'-O-methyluridine phosphorothioate
  modified_base 120: mod_base = OTHER; note = 2'-O-methylcytidine

SEQ ID NO: 288 - RNA, 120 nt, synthetic construct; identical to SEQ ID NO: 5
  source 1..120: mol_type = other RNA
  modified_base 1: mod_base = OTHER; note = 2'-O-methylguanosine phosphorothioate
  modified_base 2: mod_base = OTHER; note = 2'-O-methyluridine phosphorothioate
  modified_base 3: mod_base = OTHER; note = 2'-O-methyluridine
  modified_base 5: mod_base = OTHER; note = 2'-O-methyluridine
  modified_base 16: mod_base = OTHER; note = 2'-O-methylcytidine
  modified_base 21: mod_base = OTHER; note = 2'-O-methylcytidine
  modified_base 25: mod_base = OTHER; note = 2'-O-methylcytidine
  modified_base 26: mod_base = OTHER; note = 2'-O-methylguanosine
  modified_base 29: mod_base = OTHER; note = 2'-O-methyluridine
  modified_base 30: mod_base = OTHER; note = 2'-O-methyladenosine
  modified_base 33: mod_base = OTHER; note = 2'-O-methyluridine
  modified_base 35: mod_base = OTHER; note = 2'-O-methyluridine
  modified_base 37: mod_base = OTHER; note = 2'-O-methyladenosine
  modified_base 39: mod_base = OTHER; note = 2'-O-methyluridine
  modified_base 44: mod_base = OTHER; note = 2'-O-methylcytidine
  modified_base 45: mod_base = OTHER; note = 2'-O-methyladenosine
  modified_base 47: mod_base = OTHER; note = 2'-O-methylguanosine
  modified_base 49: mod_base = OTHER; note = 2'-O-methyluridine
  modified_base 50: mod_base = OTHER; note = 2'-O-methylguanosine
  modified_base 51: mod_base = OTHER; note = 2'-O-methyluridine
  modified_base 62: mod_base = OTHER; note = 2'-O-methyluridine
  modified_base 63: mod_base = OTHER; note = 2'-O-methyladenosine
  modified_base 65: mod_base = OTHER; note = 2'-O-methyluridine
  modified_base 67: mod_base = OTHER; note = 2'-O-methylcytidine
  modified_base 68: mod_base = OTHER; note = 2'-O-methyluridine
  modified_base 69: mod_base = OTHER; note = 2'-O-methylguanosine
  modified_base 72: mod_base = OTHER; note = 2'-O-methylcytidine
  modified_base 75: mod_base = OTHER; note = 2'-O-methyluridine
  modified_base 76: mod_base = OTHER; note = 2'-O-methylguanosine
  modified_base 79: mod_base = OTHER; note = 2'-O-methyluridine
  modified_base 82: mod_base = OTHER; note = 2'-O-methyluridine
  modified_base 83: mod_base = OTHER; note = 2'-O-methyladenosine
  modified_base 84: mod_base = OTHER; note = 2'-O-methylcytidine
  modified_base 86: mod_base = OTHER; note = 2'-O-methyladenosine
  modified_base 87: mod_base = OTHER; note = 2'-O-methylguanosine
  modified_base 89: mod_base = OTHER; note = 2'-O-methylcytidine
  modified_base 92: mod_base = OTHER; note = 2'-O-methyluridine
  modified_base 95: mod_base = OTHER; note = 2'-O-methylcytidine
  modified_base 117: mod_base = OTHER; note = 2'-O-methyladenosine phosphorothioate
  modified_base 118: mod_base = OTHER; note = 2'-O-methyluridine phosphorothioate
  modified_base 119: mod_base = OTHER; note = 2'-O-methyluridine phosphorothioate
  modified_base 120: mod_base = OTHER; note = 2'-O-methylcytidine

SEQ ID NO: 289 - RNA, 120 nt, synthetic construct; identical to SEQ ID NO: 5
  source 1..120: mol_type = other RNA
  modified_base 1: mod_base = OTHER; note = 2'-O-methylguanosine phosphorothioate
  modified_base 2: mod_base = OTHER; note = 2'-O-methyluridine phosphorothioate
  modified_base 3: mod_base = OTHER; note = 2'-O-methyluridine
  modified_base 4: mod_base = OTHER; note = 2'-O-methylcytidine
  modified_base 5: mod_base = OTHER; note = 2'-O-methyluridine
  modified_base 6: mod_base = OTHER; note = 2'-O-methylguanosine
  modified_base 7: mod_base = OTHER; note = 2'-O-methyluridine
  modified_base 11: mod_base = OTHER; note = 2'-O-methyluridine
  modified_base 16: mod_base = OTHER; note = 2'-O-methylcytidine
  modified_base 17: mod_base = OTHER; note = 2'-O-methyladenosine
  modified_base 18: mod_base = OTHER; note = 2'-O-methylguanosine
  modified_base 19: mod_base = OTHER; note = 2'-O-methylguanosine
  modified_base 20: mod_base = OTHER; note = 2'-O-methyladenosine
  modified_base 21: mod_base = OTHER; note = 2'-O-methylcytidine
  modified_base 25: mod_base = OTHER; note = 2'-O-methylcytidine
  modified_base 26: mod_base = OTHER; note = 2'-O-methylguanosine
  modified_base 27: mod_base = OTHER; note = 2'-O-methyluridine
  modified_base 28: mod_base = OTHER; note = 2'-O-methylcytidine
  modified_base 29: mod_base = OTHER; note = 2'-O-methyluridine
  modified_base 30: mod_base = OTHER; note = 2'-O-methyladenosine
  modified_base 31: mod_base = OTHER; note = 2'-O-methylguanosine
  modified_base 39: mod_base = OTHER; note = 2'-O-methyluridine
  modified_base 42: mod_base = OTHER; note = 2'-O-methyluridine
  modified_base 45: mod_base = OTHER; note = 2'-O-methyladenosine
  modified_base 46: mod_base = OTHER; note = 2'-O-methylguanosine
  modified_base 47: mod_base = OTHER; note = 2'-O-methylguanosine
  modified_base 48: mod_base = OTHER; note = 2'-O-methylguanosine
  modified_base 49: mod_base = OTHER; note = 2'-O-methyluridine
  modified_base 50: mod_base = OTHER; note = 2'-O-methylguanosine
  modified_base 51: mod_base = OTHER; note = 2'-O-methyluridine
  modified_base 52: mod_base = OTHER; note = 2'-O-methylguanosine
  modified_base 57: mod_base = OTHER; note = 2'-O-methyladenosine
  modified_base 58: mod_base = OTHER; note = 2'-O-methylcytidine
  modified_base 59: mod_base = OTHER; note = 2'-O-methyluridine
  modified_base 60: mod_base = OTHER; note = 2'-O-methylcytidine
  modified_base 61: mod_base = OTHER; note = 2'-O-methylcytidine
  modified_base 62: mod_base = OTHER; note = 2'-O-methyluridine
  modified_base 64: mod_base = OTHER; note = 2'-O-methyluridine
  modified_base 65: mod_base = OTHER; note = 2'-O-methyluridine
  modified_base 70: mod_base = OTHER; note = 2'-O-methylguanosine
  modified_base 71: mod_base = OTHER; note = 2'-O-methyladenosine
  modified_base 72: mod_base = OTHER; note = 2'-O-methylcytidine
  modified_base 73: mod_base = OTHER; note = 2'-O-methylguanosine
  modified_base 74: mod_base = OTHER; note = 2'-O-methyladenosine
  modified_base 75: mod_base = OTHER; note = 2'-O-methyluridine
  modified_base 76: mod_base = OTHER; note = 2'-O-methylguanosine
  modified_base 77: mod_base = OTHER; note = 2'-O-methyluridine
  modified_base 78: mod_base = OTHER; note = 2'-O-methylcytidine
  modified_base 79: mod_base = OTHER; note = 2'-O-methyluridine
  modified_base 80: mod_base = OTHER; note = 2'-O-methylcytidine
  modified_base 81: mod_base = OTHER; note = 2'-O-methyluridine
  modified_base 82: mod_base = OTHER; note = 2'-O-methyluridine
  modified_base 83: mod_base = OTHER; note = 2'-O-methyladenosine
  modified_base 84: mod_base = OTHER; note = 2'-O-methylcytidine
  modified_base 85: mod_base = OTHER; note = 2'-O-methylguanosine
  modified_base 86: mod_base = OTHER; note = 2'-O-methyladenosine
  modified_base 87: mod_base = OTHER; note = 2'-O-methylguanosine
  modified_base 117: mod_base = OTHER; note = 2'-O-methyladenosine phosphorothioate
  modified_base 118: mod_base = OTHER; note = 2'-O-methyluridine phosphorothioate
  modified_base 119: mod_base = OTHER; note = 2'-O-methyluridine phosphorothioate
  modified_base 120: mod_base = OTHER; note = 2'-O-methylcytidine

SEQ ID NO: 290 - RNA, 120 nt, synthetic construct; identical to SEQ ID NO: 5
  source 1..120: mol_type = other RNA
  modified_base 1: mod_base = OTHER; note = 2'-O-methylguanosine phosphorothioate
  modified_base 2: mod_base = OTHER; note = 2'-O-methyluridine phosphorothioate
  modified_base 3: mod_base = OTHER; note = 2'-O-methyluridine
  modified_base 4: mod_base = OTHER; note = 2'-O-methylcytidine
  modified_base 5: mod_base = OTHER; note = 2'-O-methyluridine
  modified_base 6: mod_base = OTHER; note = 2'-O-methylguanosine
  modified_base 7: mod_base = OTHER; note = 2'-O-methyluridine
  modified_base 11: mod_base = OTHER; note = 2'-O-methyluridine
  modified_base 16: mod_base = OTHER; note = 2'-O-methylcytidine
  modified_base 17: mod_base = OTHER; note = 2'-O-methyladenosine
  modified_base 18: mod_base = OTHER; note = 2'-O-methylguanosine
  modified_base 19: mod_base = OTHER; note = 2'-O-methylguanosine
  modified_base 20: mod_base = OTHER; note = 2'-O-methyladenosine
  modified_base 21: mod_base = OTHER; note = 2'-O-methylcytidine
  modified_base 25: mod_base = OTHER; note = 2'-O-methylcytidine
  modified_base 26: mod_base = OTHER; note = 2'-O-methylguanosine
  modified_base 27: mod_base = OTHER; note = 2'-O-methyluridine
  modified_base 28: mod_base = OTHER; note = 2'-O-methylcytidine
  modified_base 29: mod_base = OTHER; note = 2'-O-methyluridine
  modified_base 30: mod_base = OTHER; note = 2'-O-methyladenosine
  modified_base 31: mod_base = OTHER; note = 2'-O-methylguanosine
  modified_base 45: mod_base = OTHER; note = 2'-O-methyladenosine
  modified_base 46: mod_base = OTHER; note = 2'-O-methylguanosine
  modified_base 47: mod_base = OTHER; note = 2'-O-methylguanosine
  modified_base 48: mod_base = OTHER; note = 2'-O-methylguanosine
  modified_base 49: mod_base = OTHER; note = 2'-O-methyluridine
  modified_base 50: mod_base = OTHER; note = 2'-O-methylguanosine
  modified_base 51: mod_base = OTHER; note = 2'-O-methyluridine
  modified_base 52: mod_base = OTHER; note = 2'-O-methylguanosine
  modified_base 57: mod_base = OTHER; note = 2'-O-methyladenosine
  modified_base 58: mod_base = OTHER; note = 2'-O-methylcytidine
  modified_base 59: mod_base = OTHER; note = 2'-O-methyluridine
  modified_base 60: mod_base = OTHER; note = 2'-O-methylcytidine
  modified_base 61: mod_base = OTHER; note = 2'-O-methylcytidine
  modified_base 62: mod_base = OTHER; note = 2'-O-methyluridine
  modified_base 64: mod_base = OTHER; note = 2'-O-methyluridine
  modified_base 65: mod_base = OTHER; note = 2'-O-methyluridine
  modified_base 70: mod_base = OTHER; note = 2'-O-methylguanosine
  modified_base 71: mod_base = OTHER; note = 2'-O-methyladenosine
  modified_base 72: mod_base = OTHER; note = 2'-O-methylcytidine
  modified_base 73: mod_base = OTHER; note = 2'-O-methylguanosine
  modified_base 74: mod_base = OTHER; note = 2'-O-methyladenosine
  modified_base 75: mod_base = OTHER; note = 2'-O-methyluridine
  modified_base 76: mod_base = OTHER; note = 2'-O-methylguanosine
  modified_base 77: mod_base = OTHER; note = 2'-O-methyluridine
  modified_base 78: mod_base = OTHER; note = 2'-O-methylcytidine
  modified_base 79: mod_base = OTHER; note = 2'-O-methyluridine
  modified_base 80: mod_base = OTHER; note = 2'-O-methylcytidine
  modified_base 81: mod_base = OTHER; note = 2'-O-methyluridine
  modified_base 82: mod_base = OTHER; note = 2'-O-methyluridine
  modified_base 83: mod_base = OTHER; note = 2'-O-methyladenosine
  modified_base 84: mod_base = OTHER; note = 2'-O-methylcytidine
  modified_base 85: mod_base = OTHER; note = 2'-O-methylguanosine
  modified_base 86: mod_base = OTHER; note = 2'-O-methyladenosine
  modified_base 87: mod_base = OTHER; note = 2'-O-methylguanosine
  modified_base 117: mod_base = OTHER; note = 2'-O-methyladenosine phosphorothioate
  modified_base 118: mod_base = OTHER; note = 2'-O-methyluridine phosphorothioate
  modified_base 119: mod_base = OTHER; note = 2'-O-methyluridine phosphorothioate
  modified_base 120: mod_base = OTHER; note = 2'-O-methylcytidine

SEQ ID NO: 291 - RNA, 120 nt, synthetic construct; identical to SEQ ID NO: 5
  source 1..120: mol_type = other RNA
  modified_base 1: mod_base = OTHER; note = 2'-O-methylguanosine phosphorothioate
  modified_base 2: mod_base = OTHER; note = 2'-O-methyluridine phosphorothioate
  modified_base 3: mod_base = OTHER; note = 2'-O-methyluridine
  modified_base 25: mod_base = OTHER; note = 2'-O-methylcytidine
  modified_base 26: mod_base = OTHER; note = 2'-O-methylguanosine
  modified_base 27: mod_base = OTHER; note = 2'-O-methyluridine
  modified_base 28: mod_base = OTHER; note = 2'-O-methylcytidine
  modified_base 29: mod_base = OTHER; note = 2'-O-methyluridine
  modified_base 30: mod_base = OTHER; note = 2'-O-methyladenosine
  modified_base 31: mod_base = OTHER; note = 2'-O-methylguanosine
  modified_base 39: mod_base = OTHER; note = 2'-O-methyluridine
  modified_base 42: mod_base = OTHER; note = 2'-O-methyluridine
  modified_base 45: mod_base = OTHER; note = 2'-O-methyladenosine
  modified_base 46: mod_base = OTHER; note = 2'-O-methylguanosine
  modified_base 47: mod_base = OTHER; note = 2'-O-methylguanosine
  modified_base 48: mod_base = OTHER; note = 2'-O-methylguanosine
  modified_base 49: mod_base = OTHER; note = 2'-O-methyluridine
  modified_base 50: mod_base = OTHER; note = 2'-O-methylguanosine
  modified_base 51: mod_base = OTHER; note = 2'-O-methyluridine
  modified_base 52: mod_base = OTHER; note = 2'-O-methylguanosine
  modified_base 57: mod_base = OTHER; note = 2'-O-methyladenosine
  modified_base 58: mod_base = OTHER; note = 2'-O-methylcytidine
  modified_base 59: mod_base = OTHER; note = 2'-O-methyluridine
  modified_base 60: mod_base = OTHER; note = 2'-O-methylcytidine
  modified_base 61: mod_base = OTHER; note = 2'-O-methylcytidine
  modified_base 62: mod_base = OTHER; note = 2'-O-methyluridine
  modified_base 64: mod_base = OTHER; note = 2'-O-methyluridine
  modified_base 65: mod_base = OTHER; note = 2'-O-methyluridine
  modified_base 70: mod_base = OTHER; note = 2'-O-methylguanosine
  modified_base 71: mod_base = OTHER; note = 2'-O-methyladenosine
  modified_base 72: mod_base = OTHER; note = 2'-O-methylcytidine
  modified_base 73: mod_base = OTHER; note = 2'-O-methylguanosine
  modified_base 74: mod_base = OTHER; note = 2'-O-methyladenosine
  modified_base 75: mod_base = OTHER; note = 2'-O-methyluridine
  modified_base 76: mod_base = OTHER; note = 2'-O-methylguanosine
  modified_base 77: mod_base = OTHER; note = 2'-O-methyluridine
  modified_base 78: mod_base = OTHER; note = 2'-O-methylcytidine
  modified_base 79: mod_base = OTHER; note = 2'-O-methyluridine
  modified_base 80: mod_base = OTHER; note = 2'-O-methylcytidine
  modified_base 81: mod_base = OTHER; note = 2'-O-methyluridine
  modified_base 82: mod_base = OTHER; note = 2'-O-methyluridine
  modified_base 83: mod_base = OTHER; note = 2'-O-methyladenosine
  modified_base 84: mod_base = OTHER; note = 2'-O-methylcytidine
  modified_base 85: mod_base = OTHER; note = 2'-O-methylguanosine
  modified_base 86: mod_base = OTHER; note = 2'-O-methyladenosine
  modified_base 87: mod_base = OTHER; note = 2'-O-methylguanosine
  modified_base 117: mod_base = OTHER; note = 2'-O-methyladenosine phosphorothioate
  modified_base 118: mod_base = OTHER; note = 2'-O-methyluridine phosphorothioate
  modified_base 119: mod_base = OTHER; note = 2'-O-methyluridine phosphorothioate
  modified_base 120: mod_base = OTHER; note = 2'-O-methylcytidine

SEQ ID NO: 292 - RNA, 120 nt, synthetic construct; identical to SEQ ID NO: 5
  source 1..120: mol_type = other RNA
  modified_base 1: mod_base = OTHER; note = 2'-O-methylguanosine phosphorothioate
  modified_base 2: mod_base = OTHER; note = 2'-O-methyluridine phosphorothioate
  modified_base 3: mod_base = OTHER; note = 2'-O-methyluridine
  modified_base 4: mod_base = OTHER; note = 2'-O-methylcytidine
  modified_base 5: mod_base = OTHER; note = 2'-O-methyluridine
  modified_base 6: mod_base = OTHER; note = 2'-O-methylguanosine
  modified_base 7: mod_base = OTHER; note = 2'-O-methyluridine
  modified_base 11: mod_base = OTHER; note = 2'-O-methyluridine
  modified_base 16: mod_base = OTHER; note = 2'-O-methylcytidine
  modified_base 17: mod_base = OTHER; note = 2'-O-methyladenosine
  modified_base 18: mod_base = OTHER; note = 2'-O-methylguanosine
  modified_base 19: mod_base = OTHER; note = 2'-O-methylguanosine
  modified_base 20: mod_base = OTHER; note = 2'-O-methyladenosine
  modified_base 21: mod_base = OTHER; note = 2'-O-methylcytidine
  modified_base 25: mod_base = OTHER; note = 2'-O-methylcytidine
  modified_base 26: mod_base = OTHER; note = 2'-O-methylguanosine
  modified_base 27: mod_base = OTHER; note = 2'-O-methyluridine
  modified_base 28: mod_base = OTHER; note = 2'-O-methylcytidine
  modified_base 29: mod_base = OTHER; note = 2'-O-methyluridine
  modified_base 30: mod_base = OTHER; note = 2'-O-methyladenosine
  modified_base 31: mod_base = OTHER; note = 2'-O-methylguanosine
  modified_base 39: mod_base = OTHER; note = 2'-O-methyluridine
  modified_base 42: mod_base = OTHER; note = 2'-O-methyluridine
  modified_base 64: mod_base = OTHER; note = 2'-O-methyluridine
  modified_base 65: mod_base = OTHER; note = 2'-O-methyluridine
  modified_base 70: mod_base = OTHER; note = 2'-O-methylguanosine
  modified_base 71: mod_base = OTHER; note = 2'-O-methyladenosine
  modified_base 72: mod_base = OTHER; note = 2'-O-methylcytidine
  modified_base 73: mod_base = OTHER; note = 2'-O-methylguanosine
  modified_base 74: mod_base = OTHER; note = 2'-O-methyladenosine
  modified_base 75: mod_base = OTHER; note = 2'-O-methyluridine
  modified_base 76: mod_base = OTHER; note = 2'-O-methylguanosine
  modified_base 77: mod_base = OTHER; note = 2'-O-methyluridine
  modified_base 78: mod_base = OTHER; note = 2'-O-methylcytidine
  modified_base 79: mod_base = OTHER; note = 2'-O-methyluridine
  modified_base 80: mod_base = OTHER; note = 2'-O-methylcytidine
  modified_base 81: mod_base = OTHER; note = 2'-O-methyluridine
  modified_base 82: mod_base = OTHER; note = 2'-O-methyluridine
  modified_base 83: mod_base = OTHER; note = 2'-O-methyladenosine
  modified_base 84: mod_base = OTHER; note = 2'-O-methylcytidine
  modified_base 85: mod_base = OTHER; note = 2'-O-methylguanosine
  modified_base 86: mod_base = OTHER; note = 2'-O-methyladenosine
  modified_base 87: mod_base = OTHER; note = 2'-O-methylguanosine
  modified_base 117: mod_base = OTHER; note = 2'-O-methyladenosine phosphorothioate
  modified_base 118: mod_base = OTHER; note = 2'-O-methyluridine phosphorothioate
  modified_base 119: mod_base = OTHER; note = 2'-O-methyluridine phosphorothioate
  modified_base 120: mod_base = OTHER; note = 2'-O-methylcytidine

SEQ ID NO: 293 - RNA, 120 nt, synthetic construct; identical to SEQ ID NO: 5
  source 1..120: mol_type = other RNA
  modified_base 1: mod_base = OTHER; note = 2'-O-methylguanosine phosphorothioate
  modified_base 2: mod_base = OTHER; note = 2'-O-methyluridine phosphorothioate
  modified_base 3: mod_base = OTHER; note = 2'-O-methyluridine
  modified_base 98: mod_base = OTHER; note = 2'-O-methyladenosine
  modified_base 104: mod_base = OTHER; note = 2'-O-methyluridine
  modified_base 105: mod_base = OTHER; note = 2'-O-methylcytidine
  modified_base 109: mod_base = OTHER; note = 2'-O-methylguanosine
  modified_base 110: mod_base = OTHER; note = 2'-O-methylguanosine
  modified_base 117: mod_base = OTHER; note = 2'-O-methyladenosine phosphorothioate
  modified_base 118: mod_base = OTHER; note = 2'-O-methyluridine phosphorothioate
  modified_base 119: mod_base = OTHER; note = 2'-O-methyluridine phosphorothioate
  modified_base 120: mod_base = OTHER; note = 2'-O-methylcytidine

SEQ ID NO: 294 - RNA, 120 nt, synthetic construct; identical to SEQ ID NO: 5
  source 1..120: mol_type = other RNA
  modified_base 1: mod_base = OTHER; note = 2'-O-methylguanosine phosphorothioate
  modified_base 2: mod_base = OTHER; note = 2'-O-methyluridine phosphorothioate
  modified_base 3: mod_base = OTHER; note = 2'-O-methyluridine
  modified_base 4: mod_base = OTHER; note = 2'-O-methylcytidine
  modified_base 5: mod_base = OTHER; note = 2'-O-methyluridine
  modified_base 6: mod_base = OTHER; note = 2'-O-methylguanosine
  modified_base 7: mod_base = OTHER; note = 2'-O-methyluridine
  modified_base 11: mod_base = OTHER; note = 2'-O-methyluridine
  modified_base 16: mod_base = OTHER; note = 2'-O-methylcytidine
  modified_base 17: mod_base = OTHER; note = 2'-O-methyladenosine
  modified_base 18: mod_base = OTHER; note = 2'-O-methylguanosine
  modified_base 19: mod_base = OTHER; note = 2'-O-methylguanosine
  modified_base 20: mod_base = OTHER; note = 2'-O-methyladenosine
  modified_base 21: mod_base = OTHER; note = 2'-O-methylcytidine
  modified_base 25: mod_base = OTHER; note = 2'-O-methylcytidine
  modified_base 26: mod_base = OTHER; note = 2'-O-methylguanosine
  modified_base 27: mod_base = OTHER; note = 2'-O-methyluridine
  modified_base 28: mod_base = OTHER; note = 2'-O-methylcytidine
  modified_base 29: mod_base = OTHER; note = 2'-O-methyluridine
  modified_base 30: mod_base = OTHER; note = 2'-O-methyladenosine
  modified_base 31: mod_base = OTHER; note = 2'-O-methylguanosine
  modified_base 39: mod_base = OTHER; note = 2'-O-methyluridine
  modified_base 42: mod_base = OTHER; note = 2'-O-methyluridine
  modified_base 45: mod_base = OTHER; note = 2'-O-methyladenosine
  modified_base 46: mod_base = OTHER; note = 2'-O-methylguanosine
  modified_base 47: mod_base = OTHER; note = 2'-O-methylguanosine
  modified_base 48: mod_base = OTHER; note = 2'-O-methylguanosine
  modified_base 49: mod_base = OTHER; note = 2'-O-methyluridine
  modified_base 50: mod_base = OTHER; note = 2'-O-methylguanosine
  modified_base 51: mod_base = OTHER; note = 2'-O-methyluridine
  modified_base 52: mod_base = OTHER; note = 2'-O-methylguanosine
  modified_base 57: mod_base = OTHER; note = 2'-O-methyladenosine
  modified_base 58: mod_base = OTHER; note = 2'-O-methylcytidine
  modified_base 59: mod_base = OTHER; note = 2'-O-methyluridine
  modified_base 60: mod_base = OTHER; note = 2'-O-methylcytidine
  modified_base 61: mod_base = OTHER; note = 2'-O-methylcytidine
  modified_base 62: mod_base = OTHER; note = 2'-O-methyluridine
  modified_base 64: mod_base = OTHER; note = 2'-O-methyluridine
  modified_base 65: mod_base = OTHER; note = 2'-O-methyluridine
  modified_base 70: mod_base = OTHER; note = 2'-O-methylguanosine
  modified_base 71: mod_base = OTHER; note = 2'-O-methyladenosine
  modified_base 72: mod_base = OTHER; note = 2'-O-methylcytidine
  modified_base 73: mod_base = OTHER; note = 2'-O-methylguanosine
  modified_base 74: mod_base = OTHER; note = 2'-O-methyladenosine
  modified_base 75: mod_base = OTHER; note = 2'-O-methyluridine
  modified_base 76: mod_base = OTHER; note = 2'-O-methylguanosine
  modified_base 77: mod_base = OTHER; note = 2'-O-methyluridine
  modified_base 78: mod_base = OTHER; note = 2'-O-methylcytidine
  modified_base 79: mod_base = OTHER; note = 2'-O-methyluridine
  modified_base 80: mod_base = OTHER; note = 2'-O-methylcytidine
  modified_base 81: mod_base = OTHER; note = 2'-O-methyluridine
  modified_base 82: mod_base = OTHER; note = 2'-O-methyluridine
  modified_base 83: mod_base = OTHER; note = 2'-O-methyladenosine
  modified_base 84: mod_base = OTHER; note = 2'-O-methylcytidine
  modified_base 85: mod_base = OTHER; note = 2'-O-methylguanosine
  modified_base 86: mod_base = OTHER; note = 2'-O-methyladenosine
  modified_base 87: mod_base = OTHER; note = 2'-O-methylguanosine
  modified_base 98: mod_base = OTHER; note = 2'-O-methyladenosine
  modified_base 104: mod_base = OTHER; note = 2'-O-methyluridine
  modified_base 105: mod_base = OTHER; note = 2'-O-methylcytidine
  modified_base 109: mod_base = OTHER; note = 2'-O-methylguanosine
  modified_base 110: mod_base = OTHER; note = 2'-O-methylguanosine
  modified_base 117: mod_base = OTHER; note = 2'-O-methyladenosine phosphorothioate
  modified_base 118: mod_base = OTHER; note = 2'-O-methyluridine phosphorothioate
  modified_base 119: mod_base = OTHER; note = 2'-O-methyluridine phosphorothioate
  modified_base 120: mod_base = OTHER; note = 2'-O-methylcytidine

SEQ ID NO: 295 - RNA, 120 nt, synthetic construct; identical to SEQ ID NO: 5
  source 1..120: mol_type = other RNA
  modified_base 1: mod_base = OTHER; note = 2'-O-methylguanosine phosphorothioate
  modified_base 2: mod_base = OTHER; note = 2'-O-methyluridine phosphorothioate
  modified_base 3: mod_base = OTHER; note = 2'-O-methyluridine
  modified_base 4: mod_base = OTHER; note = 2'-O-methylcytidine
  modified_base 5: mod_base = OTHER; note = 2'-O-methyluridine
  modified_base 6: mod_base = OTHER; note = 2'-O-methylguanosine
  modified_base 7: mod_base = OTHER; note = 2'-O-methyluridine
  modified_base 11: mod_base = OTHER; note = 2'-O-methyluridine
  modified_base 16: mod_base = OTHER; note = 2'-O-methylcytidine
  modified_base 17: mod_base = OTHER; note = 2'-O-methyladenosine
  modified_base 18: mod_base = OTHER; note = 2'-O-methylguanosine
  modified_base 19: mod_base = OTHER; note = 2'-O-methylguanosine
  modified_base 20: mod_base = OTHER; note = 2'-O-methyladenosine
  modified_base 21: mod_base = OTHER; note = 2'-O-methylcytidine
  modified_base 25: mod_base = OTHER; note = 2'-O-methylcytidine
  modified_base 26: mod_base = OTHER; note = 2'-O-methylguanosine
  modified_base 27: mod_base = OTHER; note = 2'-O-methyluridine
  modified_base 28: mod_base = OTHER; note = 2'-O-methylcytidine
  modified_base 29: mod_base = OTHER; note = 2'-O-methyluridine
  modified_base 30: mod_base = OTHER; note = 2'-O-methyladenosine
  modified_base 31: mod_base = OTHER; note = 2'-O-methylguanosine
  modified_base 39: mod_base = OTHER; note = 2'-O-methyluridine
  modified_base 42: mod_base = OTHER; note = 2'-O-methyluridine
  modified_base 45: mod_base = OTHER; note = 2'-O-methyladenosine
  modified_base 46: mod_base = OTHER; note = 2'-O-methylguanosine
  modified_base 47: mod_base = OTHER; note = 2'-O-methylguanosine
  modified_base 48: mod_base = OTHER; note = 2'-O-methylguanosine
  modified_base 49: mod_base = OTHER; note = 2'-O-methyluridine
  modified_base 50: mod_base = OTHER; note = 2'-O-methylguanosine
  modified_base 51: mod_base = OTHER; note = 2'-O-methyluridine
  modified_base 52: mod_base = OTHER; note = 2'-O-methylguanosine
  modified_base 57: mod_base = OTHER; note = 2'-O-methyladenosine
  modified_base 58: mod_base = OTHER; note = 2'-O-methylcytidine
  modified_base 59: mod_base = OTHER; note = 2'-O-methyluridine
  modified_base 60: mod_base = OTHER; note = 2'-O-methylcytidine
  modified_base 61: mod_base = OTHER; note = 2'-O-methylcytidine
  modified_base 62: mod_base = OTHER; note = 2'-O-methyluridine
  modified_base 64: mod_base = OTHER; note = 2'-O-methyluridine
  modified_base 65: mod_base = OTHER; note = 2'-O-methyluridine
  modified_base 70: mod_base = OTHER; note = 2'-O-methylguanosine
  modified_base 71: mod_base = OTHER; note = 2'-O-methyladenosine
  modified_base 72: mod_base = OTHER; note = 2'-O-methylcytidine
  modified_base 73: mod_base = OTHER; note = 2'-O-methylguanosine
  modified_base 74: mod_base = OTHER; note = 2'-O-methyladenosine
  modified_base 75: mod_base = OTHER; note = 2'-O-methyluridine
  modified_base 76: mod_base = OTHER; note = 2'-O-methylguanosine
  modified_base 77: mod_base = OTHER; note = 2'-O-methyluridine
  modified_base 78: mod_base = OTHER; note = 2'-O-methylcytidine
  modified_base 79: mod_base = OTHER; note = 2'-O-methyluridine
  modified_base 80: mod_base = OTHER; note = 2'-O-methylcytidine
  modified_base 81: mod_base = OTHER; note = 2'-O-methyluridine
  modified_base 82: mod_base = OTHER; note = 2'-O-methyluridine
  modified_base 83: mod_base = OTHER; note = 2'-O-methyladenosine
  modified_base 84: mod_base = OTHER; note = 2'-O-methylcytidine
  modified_base 85: mod_base = OTHER; note = 2'-O-methylguanosine
  modified_base 86: mod_base = OTHER; note = 2'-O-methyladenosine
  modified_base 87: mod_base = OTHER; note = 2'-O-methylguanosine
  modified_base 98: mod_base = OTHER; note = 2'-O-methyladenosine
  modified_base 101: mod_base = OTHER; note = 2'-O-methyluridine
  modified_base 104: mod_base = OTHER; note = 2'-O-methyluridine
  modified_base 105: mod_base = OTHER; note = 2'-O-methylcytidine
  modified_base 108: mod_base = OTHER; note = 2'-O-methyluridine
  modified_base 109: mod_base = OTHER; note = 2'-O-methylguanosine
  modified_base 110: mod_base = OTHER; note = 2'-O-methylguanosine
  modified_base 115: mod_base = OTHER; note = 2'-O-methyluridine
  modified_base 117: mod_base = OTHER; note = 2'-O-methyladenosine phosphorothioate
  modified_base 118: mod_base = OTHER; note = 2'-O-methyluridine phosphorothioate
  modified_base 119: mod_base = OTHER; note = 2'-O-methyluridine phosphorothioate
  modified_base 120: mod_base = OTHER; note = 2'-O-methylcytidine

SEQ ID NO: 296 - RNA, 120 nt, synthetic construct; identical to SEQ ID NO: 5
  source 1..120: mol_type = other RNA
  modified_base 1: mod_base = OTHER; note = 2'-O-methylguanosine phosphorothioate
  modified_base 2: mod_base = OTHER; note = 2'-O-methyluridine phosphorothioate
  modified_base 3: mod_base = OTHER; note = 2'-O-methyluridine
  modified_base 4: mod_base = OTHER; note = 2'-O-methylcytidine
  modified_base 5: mod_base = OTHER; note = 2'-O-methyluridine
  modified_base 6: mod_base = OTHER; note = 2'-O-methylguanosine
  modified_base 7: mod_base = OTHER; note = 2'-O-methyluridine
  modified_base 11: mod_base = OTHER; note = 2'-O-methyluridine
  modified_base 16: mod_base = OTHER; note = 2'-O-methylcytidine
  modified_base 17: mod_base = OTHER; note = 2'-O-methyladenosine
  modified_base 18: mod_base = OTHER; note = 2'-O-methylguanosine
  modified_base 19: mod_base = OTHER; note = 2'-O-methylguanosine
  modified_base 20: mod_base = OTHER; note = 2'-O-methyladenosine
  modified_base 21: mod_base = OTHER; note = 2'-O-methylcytidine
  modified_base 25: mod_base = OTHER; note = 2'-O-methylcytidine
  modified_base 26: mod_base = OTHER; note = 2'-O-methylguanosine
  modified_base 27: mod_base = OTHER; note = 2'-O-methyluridine
  modified_base 28: mod_base = OTHER; note = 2'-O-methylcytidine
  modified_base 29: mod_base = OTHER; note = 2'-O-methyluridine
  modified_base 30: mod_base = OTHER; note = 2'-O-methyladenosine
  modified_base 31: mod_base = OTHER; note = 2'-O-methylguanosine
  modified_base 33: mod_base = OTHER; note = 2'-O-methyluridine
  modified_base 39: mod_base = OTHER; note = 2'-O-methyluridine
  modified_base 42: mod_base = OTHER; note = 2'-O-methyluridine
  modified_base 45: mod_base = OTHER; note = 2'-O-methyladenosine
  modified_base 46: mod_base = OTHER; note = 2'-O-methylguanosine
  modified_base 47: mod_base = OTHER; note = 2'-O-methylguanosine
  modified_base 48: mod_base = OTHER; note = 2'-O-methylguanosine
  modified_base 49: mod_base = OTHER; note = 2'-O-methyluridine
  modified_base 50: mod_base = OTHER; note = 2'-O-methylguanosine
  modified_base 51: mod_base = OTHER; note = 2'-O-methyluridine
  modified_base 52: mod_base = OTHER; note = 2'-O-methylguanosine
  modified_base 57: mod_base = OTHER; note = 2'-O-methyladenosine
  modified_base 58: mod_base = OTHER; note = 2'-O-methylcytidine
  modified_base 59: mod_base = OTHER; note = 2'-O-methyluridine
  modified_base 60: mod_base = OTHER; note = 2'-O-methylcytidine
  modified_base 61: mod_base = OTHER; note = 2'-O-methylcytidine
  modified_base 62: mod_base = OTHER; note = 2'-O-methyluridine
  modified_base 64: mod_base = OTHER; note = 2'-O-methyluridine
  modified_base 65: mod_base = OTHER; note = 2'-O-methyluridine
  modified_base 70: mod_base = OTHER; note = 2'-O-methylguanosine
  modified_base 71: mod_base = OTHER; note = 2'-O-methyladenosine
  modified_base 72: mod_base = OTHER; note = 2'-O-methylcytidine
  modified_base 73: mod_base = OTHER; note = 2'-O-methylguanosine
  modified_base 74: mod_base = OTHER; note = 2'-O-methyladenosine
  modified_base 75: mod_base = OTHER; note = 2'-O-methyluridine
  modified_base 76: mod_base = OTHER; note = 2'-O-methylguanosine
  modified_base 77: mod_base = OTHER; note = 2'-O-methyluridine
  modified_base 78: mod_base = OTHER; note = 2'-O-methylcytidine
  modified_base 79: mod_base = OTHER; note = 2'-O-methyluridine
  modified_base 80: mod_base = OTHER; note = 2'-O-methylcytidine
  modified_base 81: mod_base = OTHER; note = 2'-O-methyluridine
  modified_base 82: mod_base = OTHER; note = 2'-O-methyluridine
  modified_base 83: mod_base = OTHER; note = 2'-O-methyladenosine
  modified_base 84: mod_base = OTHER; note = 2'-O-methylcytidine
  modified_base 85: mod_base = OTHER; note = 2'-O-methylguanosine
  modified_base 86: mod_base = OTHER; note = 2'-O-methyladenosine
  modified_base 87: mod_base = OTHER; note = 2'-O-methylguanosine
  modified_base 89: mod_base = OTHER; note = 2'-O-methylcytidine
  modified_base 98: mod_base = OTHER; note = 2'-O-methyladenosine
  modified_base 101: mod_base = OTHER; note = 2'-O-methyluridine
  modified_base 104: mod_base = OTHER; note = 2'-O-methyluridine
  modified_base 105: mod_base = OTHER; note = 2'-O-methylcytidine
  modified_base 108: mod_base = OTHER; note = 2'-O-methyluridine
  modified_base 109: mod_base = OTHER; note = 2'-O-methylguanosine
  modified_base 110: mod_base = OTHER; note = 2'-O-methylguanosine
  modified_base 115: mod_base = OTHER; note = 2'-O-methyluridine
  modified_base 117: mod_base = OTHER; note = 2'-O-methyladenosine phosphorothioate
  modified_base 118: mod_base = OTHER; note = 2'-O-methyluridine phosphorothioate
  modified_base 119: mod_base = OTHER; note = 2'-O-methyluridine phosphorothioate
  modified_base 120: mod_base = OTHER; note = 2'-O-methylcytidine

SEQ ID NO: 297 - RNA, 123 nt, synthetic construct; identical to SEQ ID NO: 6
  source 1..123: mol_type = other RNA
  modified_base 1: mod_base = OTHER; note = 2'-O-methylguanosine phosphorothioate
  modified_base 2: mod_base = OTHER; note = 2'-O-methyluridine phosphorothioate
  modified_base 3: mod_base = OTHER; note = 2'-O-methyluridine
  modified_base 4: mod_base = OTHER; note = 2'-O-methylcytidine
  modified_base 5: mod_base = OTHER; note = 2'-O-methyluridine
  modified_base 6: mod_base = OTHER; note = 2'-O-methylguanosine
  modified_base 7: mod_base = OTHER; note = 2'-O-methyluridine
  modified_base 11: mod_base = OTHER; note = 2'-O-methyluridine
  modified_base 16: mod_base = OTHER; note = 2'-O-methylcytidine
  modified_base 17: mod_base = OTHER; note = 2'-O-methyladenosine
  modified_base 18: mod_base = OTHER; note = 2'-O-methylguanosine
  modified_base 19: mod_base = OTHER; note = 2'-O-methylguanosine
  modified_base 20: mod_base = OTHER; note = 2'-O-methyladenosine
  modified_base 21: mod_base = OTHER; note = 2'-O-methylcytidine
  modified_base 25: mod_base = OTHER; note = 2'-O-methylcytidine
  modified_base 26: mod_base = OTHER; note = 2'-O-methylguanosine
  modified_base 27: mod_base = OTHER; note = 2'-O-methyluridine
  modified_base 28: mod_base = OTHER; note = 2'-O-methylcytidine
  modified_base 29: mod_base = OTHER; note = 2'-O-methyluridine
  modified_base 30: mod_base = OTHER; note = 2'-O-methyladenosine
  modified_base 31: mod_base = OTHER; note = 2'-O-methylguanosine
  modified_base 39: mod_base = OTHER; note = 2'-O-methyluridine
  modified_base 41: mod_base = OTHER; note = 2'-O-methyluridine
  modified_base 44: mod_base = OTHER; note = 2'-O-methyladenosine
  modified_base 45: mod_base = OTHER; note = 2'-O-methylguanosine
  modified_base 46: mod_base = OTHER; note = 2'-O-methylguanosine
  modified_base 47: mod_base = OTHER; note = 2'-O-methylguanosine
  modified_base 48: mod_base = OTHER; note = 2'-O-methyluridine
  modified_base 49: mod_base = OTHER; note = 2'-O-methylguanosine
  modified_base 50: mod_base = OTHER; note = 2'-O-methyluridine
  modified_base 51: mod_base = OTHER; note = 2'-O-methylguanosine
  modified_base 56: mod_base = OTHER; note = 2'-O-methyladenosine
  modified_base 57: mod_base = OTHER; note = 2'-O-methylcytidine
  modified_base 58: mod_base = OTHER; note = 2'-O-methyluridine
  modified_base 59: mod_base = OTHER; note = 2'-O-methylcytidine
  modified_base 60: mod_base = OTHER; note = 2'-O-methylcytidine
  modified_base 61: mod_base = OTHER; note = 2'-O-methyluridine
  modified_base 63: mod_base = OTHER; note = 2'-O-methyluridine
  modified_base 64: mod_base = OTHER; note = 2'-O-methyluridine
  modified_base 69: mod_base = OTHER; note = 2'-O-methylguanosine
  modified_base 70: mod_base = OTHER; note = 2'-O-methyladenosine
  modified_base 71: mod_base = OTHER; note = 2'-O-methylcytidine
  modified_base 72: mod_base = OTHER; note = 2'-O-methylguanosine
  modified_base 73: mod_base = OTHER; note = 2'-O-methyladenosine
  modified_base 74: mod_base = OTHER; note = 2'-O-methyluridine
  modified_base 75: mod_base = OTHER; note = 2'-O-methylguanosine
  modified_base 76: mod_base = OTHER; note = 2'-O-methyluridine
  modified_base 77: mod_base = OTHER; note = 2'-O-methylcytidine
  modified_base 78: mod_base = OTHER; note = 2'-O-methyluridine
  modified_base 79: mod_base = OTHER; note = 2'-O-methylcytidine
  modified_base 80: mod_base = OTHER; note = 2'-O-methyluridine
  modified_base 81: mod_base = OTHER; note = 2'-O-methyluridine
  modified_base 82: mod_base = OTHER; note = 2'-O-methyladenosine
  modified_base 83: mod_base = OTHER; note = 2'-O-methylcytidine
  modified_base 84: mod_base = OTHER; note = 2'-O-methylguanosine
  modified_base 85: mod_base = OTHER; note = 2'-O-methyladenosine
  modified_base 86: mod_base = OTHER; note = 2'-O-methylguanosine
  modified_base 120: mod_base = OTHER; note = 2'-O-methyluridine phosphorothioate
  modified_base 121: mod_base = OTHER; note = 2'-O-methyluridine phosphorothioate
  modified_base 122: mod_base = OTHER; note = 2'-O-methyluridine phosphorothioate
  modified_base 123: mod_base = OTHER; note = 2'-O-methyluridine

SEQ ID NO: 298 - RNA, 120 nt, synthetic construct; identical to SEQ ID NO: 2
  source 1..120: mol_type = other RNA
  modified_base 1: mod_base = OTHER; note = 2'-O-methylguanosine phosphorothioate
  modified_base 2: mod_base = OTHER; note = 2'-O-methyluridine phosphorothioate
  modified_base 3: mod_base = OTHER; note = 2'-O-methyluridine phosphorothioate
  modified_base 5: mod_base = OTHER; note = 2'-O-methyluridine
  modified_base 16: mod_base = OTHER; note = 2'-O-methylcytidine
  modified_base 21: mod_base = OTHER; note = 2'-O-methylcytidine
  modified_base 25: mod_base = OTHER; note = 2'-O-methylcytidine
  modified_base 26: mod_base = OTHER; note = 2'-O-methylguanosine
  modified_base 29: mod_base = OTHER; note = 2'-O-methyluridine
  modified_base 30: mod_base = OTHER; note = 2'-O-methyladenosine
  modified_base 44: mod_base = OTHER; note = 2'-O-methylcytidine
  modified_base 45: mod_base = OTHER; note = 2'-O-methyladenosine
  modified_base 49: mod_base = OTHER; note = 2'-O-methyluridine
  modified_base 50: mod_base = OTHER; note = 2'-O-methylguanosine
  modified_base 62: mod_base = OTHER; note = 2'-O-methyluridine
  modified_base 63: mod_base = OTHER; note = 2'-O-methyladenosine
  modified_base 67: mod_base = OTHER; note = 2'-O-methylcytidine
  modified_base 68: mod_base = OTHER; note = 2'-O-methyluridine
  modified_base 69: mod_base = OTHER; note = 2'-O-methylguanosine
  modified_base 72: mod_base = OTHER; note = 2'-O-methylcytidine
  modified_base 75: mod_base = OTHER; note = 2'-O-methyluridine
  modified_base 76: mod_base = OTHER; note = 2'-O-methylguanosine
  modified_base 79: mod_base = OTHER; note = 2'-O-methyluridine
  modified_base 82: mod_base = OTHER; note = 2'-O-methyluridine
  modified_base 83: mod_base = OTHER; note = 2'-O-methyladenosine
  modified_base 84: mod_base = OTHER; note = 2'-O-methylcytidine
  modified_base 117: mod_base = OTHER; note = 2'-O-methyluridine
  modified_base 118: mod_base = OTHER; note = 2'-O-methyladenosine phosphorothioate
  modified_base 119: mod_base = OTHER; note = 2'-O-methyladenosine phosphorothioate
  modified_base 120: mod_base = OTHER; note = 2'-O-methyladenosine

SEQ ID NO: 299 - RNA, 120 nt, synthetic construct; identical to SEQ ID NO: 2
  source 1..120: mol_type = other RNA
  modified_base 1: mod_base = OTHER; note = 2'-O-methylguanosine phosphorothioate
  modified_base 2: mod_base = OTHER; note = 2'-O-methyluridine phosphorothioate
  modified_base 3: mod_base = OTHER; note = 2'-O-methyluridine phosphorothioate
  modified_base 5: mod_base = OTHER; note = 2'-O-methyluridine
  modified_base 16: mod_base = OTHER; note = 2'-O-methylcytidine
  modified_base 21: mod_base = OTHER; note = 2'-O-methylcytidine
  modified_base 25: mod_base = OTHER; note = 2'-O-methylcytidine
  modified_base 26: mod_base = OTHER; note = 2'-O-methylguanosine
  modified_base 29: mod_base = OTHER; note = 2'-O-methyluridine
  modified_base 30: mod_base = OTHER; note = 2'-O-methyladenosine
  modified_base 33: mod_base = OTHER; note = 2'-O-methyluridine
  modified_base 35: mod_base = OTHER; note = 2'-O-methyluridine
  modified_base 37: mod_base = OTHER; note = 2'-O-methyladenosine
  modified_base 39: mod_base = OTHER; note = 2'-O-methyluridine
  modified_base 44: mod_base = OTHER; note = 2'-O-methylcytidine
  modified_base 45: mod_base = OTHER; note = 2'-O-methyladenosine
  modified_base 47: mod_base = OTHER; note = 2'-O-methylguanosine
  modified_base 49: mod_base = OTHER; note = 2'-O-methyluridine
  modified_base 50: mod_base = OTHER; note = 2'-O-methylguanosine
  modified_base 51: mod_base = OTHER; note = 2'-O-methyluridine
  modified_base 62: mod_base = OTHER; note = 2'-O-methyluridine
  modified_base 63: mod_base = OTHER; note = 2'-O-methyladenosine
  modified_base 65: mod_base = OTHER; note = 2'-O-methyluridine
  modified_base 67: mod_base = OTHER; note = 2'-O-methylcytidine
  modified_base 68: mod_base = OTHER; note = 2'-O-methyluridine
  modified_base 69: mod_base = OTHER; note = 2'-O-methylguanosine
  modified_base 72: mod_base = OTHER; note = 2'-O-methylcytidine
  modified_base 75: mod_base = OTHER; note = 2'-O-methyluridine
  modified_base 76: mod_base = OTHER; note = 2'-O-methylguanosine
  modified_base 79: mod_base = OTHER; note = 2'-O-methyluridine
  modified_base 82: mod_base = OTHER; note = 2'-O-methyluridine
  modified_base 83: mod_base = OTHER; note = 2'-O-methyladenosine
  modified_base 84: mod_base = OTHER; note = 2'-O-methylcytidine
  modified_base 86: mod_base = OTHER; note = 2'-O-methyladenosine
  modified_base 87: mod_base = OTHER; note = 2'-O-methylguanosine
  modified_base 89: mod_base = OTHER; note = 2'-O-methylcytidine
  modified_base 92: mod_base = OTHER; note = 2'-O-methyluridine
  modified_base 95: mod_base = OTHER; note = 2'-O-methylcytidine
  modified_base 117: mod_base = OTHER; note = 2'-O-methyluridine
  modified_base 118: mod_base = OTHER; note = 2'-O-methyladenosine phosphorothioate
  modified_base 119: mod_base = OTHER; note = 2'-O-methyladenosine phosphorothioate
  modified_base 120: mod_base = OTHER; note = 2'-O-methyladenosine

SEQ ID NO: 300 - RNA, 120 nt, synthetic construct; identical to SEQ ID NO: 2
  source 1..120: mol_type = other RNA
  modified_base 1: mod_base = OTHER; note = 2'-O-methylguanosine phosphorothioate
  modified_base 2: mod_base = OTHER; note = 2'-O-methyluridine phosphorothioate
  modified_base 3: mod_base = OTHER; note = 2'-O-methyluridine phosphorothioate
  modified_base 109: mod_base = OTHER; note = 2'-O-methyluridine
  modified_base 113: mod_base = OTHER; note = 2'-O-methylcytidine
  modified_base 117: mod_base = OTHER; note = 2'-O-methyluridine
  modified_base 118: mod_base = OTHER; note = 2'-O-methyladenosine phosphorothioate
  modified_base 119: mod_base = OTHER; note = 2'-O-methyladenosine phosphorothioate
  modified_base 120: mod_base = OTHER; note = 2'-O-methyladenosine

SEQ ID NO: 301 - RNA, 120 nt, synthetic construct; identical to SEQ ID NO: 2
  source 1..120: mol_type = other RNA
  modified_base 1: mod_base = OTHER; note = 2'-O-methylguanosine phosphorothioate
  modified_base 2: mod_base = OTHER; note = 2'-O-methyluridine phosphorothioate
  modified_base 3: mod_base = OTHER; note = 2'-O-methyluridine phosphorothioate
  modified_base 5: mod_base = OTHER; note = 2'-O-methyluridine
  modified_base 16: mod_base = OTHER; note = 2'-O-methylcytidine
  modified_base 21: mod_base = OTHER; note = 2'-O-methylcytidine
  modified_base 25: mod_base = OTHER; note = 2'-O-methylcytidine
  modified_base 26: mod_base = OTHER; note = 2'-O-methylguanosine
  modified_base 29: mod_base = OTHER; note = 2'-O-methyluridine
  modified_base 30: mod_base = OTHER; note = 2'-O-methyladenosine
  modified_base 44: mod_base = OTHER; note = 2'-O-methylcytidine
  modified_base 45: mod_base = OTHER; note = 2'-O-methyladenosine
  modified_base 49: mod_base = OTHER; note = 2'-O-methyluridine
  modified_base 50: mod_base = OTHER; note = 2'-O-methylguanosine
  modified_base 62: mod_base = OTHER; note = 2'-O-methyluridine
  modified_base 63: mod_base = OTHER; note = 2'-O-methyladenosine
  modified_base 67: mod_base = OTHER; note = 2'-O-methylcytidine
  modified_base 68: mod_base = OTHER; note = 2'-O-methyluridine
  modified_base 69: mod_base = OTHER; note = 2'-O-methylguanosine
  modified_base 72: mod_base = OTHER; note = 2'-O-methylcytidine
  modified_base 75: mod_base = OTHER; note = 2'-O-methyluridine
  modified_base 76: mod_base = OTHER; note = 2'-O-methylguanosine
  modified_base 79: mod_base = OTHER; note = 2'-O-methyluridine
  modified_base 82: mod_base = OTHER; note = 2'-O-methyluridine
  modified_base 83: mod_base = OTHER; note = 2'-O-methyladenosine
  modified_base 84: mod_base = OTHER; note = 2'-O-methylcytidine
  modified_base 109: mod_base = OTHER; note = 2'-O-methyluridine
  modified_base 113: mod_base = OTHER; note = 2'-O-methylcytidine
  modified_base 117: mod_base = OTHER; note = 2'-O-methyluridine
  modified_base 118: mod_base = OTHER; note = 2'-O-methyladenosine phosphorothioate
  modified_base 119: mod_base = OTHER; note = 2'-O-methyladenosine phosphorothioate
  modified_base 120: mod_base = OTHER; note = 2'-O-methyladenosine

SEQ ID NO: 302 - RNA, 120 nt, synthetic construct; identical to SEQ ID NO: 2
  source 1..120: mol_type = other RNA
  modified_base 1: mod_base = OTHER; note = 2'-O-methylguanosine phosphorothioate
  modified_base 2: mod_base = OTHER; note = 2'-O-methyluridine phosphorothioate
  modified_base 3: mod_base = OTHER; note = 2'-O-methyluridine phosphorothioate
  modified_base 5: mod_base = OTHER; note = 2'-O-methyluridine
  modified_base 16: mod_base = OTHER; note = 2'-O-methylcytidine
  modified_base 21: mod_base = OTHER; note = 2'-O-methylcytidine
  modified_base 25: mod_base = OTHER; note = 2'-O-methylcytidine
  modified_base 26: mod_base = OTHER; note = 2'-O-methylguanosine
  modified_base 29: mod_base = OTHER; note = 2'-O-methyluridine
  modified_base 30: mod_base = OTHER; note = 2'-O-methyladenosine
  modified_base 33: mod_base = OTHER; note = 2'-O-methyluridine
  modified_base 35: mod_base = OTHER; note = 2'-O-methyluridine
  modified_base 37: mod_base = OTHER; note = 2'-O-methyladenosine
  modified_base 39: mod_base = OTHER; note = 2'-O-methyluridine
  modified_base 44: mod_base = OTHER; note = 2'-O-methylcytidine
  modified_base 45: mod_base = OTHER; note = 2'-O-methyladenosine
  modified_base 47: mod_base = OTHER; note = 2'-O-methylguanosine
  modified_base 49: mod_base = OTHER; note = 2'-O-methyluridine
  modified_base 50: mod_base = OTHER; note = 2'-O-methylguanosine
  modified_base 51: mod_base = OTHER; note = 2'-O-methyluridine
  modified_base 62: mod_base = OTHER; note = 2'-O-methyluridine
  modified_base 63: mod_base = OTHER; note = 2'-O-methyladenosine
  modified_base 65: mod_base = OTHER; note = 2'-O-methyluridine
  modified_base 67: mod_base = OTHER; note = 2'-O-methylcytidine
  modified_base 68: mod_base = OTHER; note = 2'-O-methyluridine
  modified_base 69: mod_base = OTHER; note = 2'-O-methylguanosine
  modified_base 72: mod_base = OTHER; note = 2'-O-methylcytidine
  modified_base 75: mod_base = OTHER; note = 2'-O-methyluridine
  modified_base 76: mod_base = OTHER; note = 2'-O-methylguanosine
  modified_base 79: mod_base = OTHER; note = 2'-O-methyluridine
  modified_base 82: mod_base = OTHER; note = 2'-O-methyluridine
  modified_base 83: mod_base = OTHER; note = 2'-O-methyladenosine
  modified_base 84: mod_base = OTHER; note = 2'-O-methylcytidine
  modified_base 86: mod_base = OTHER; note = 2'-O-methyladenosine
  modified_base 87: mod_base = OTHER; note = 2'-O-methylguanosine
  modified_base 89: mod_base = OTHER; note = 2'-O-methylcytidine
  modified_base 92: mod_base = OTHER; note = 2'-O-methyluridine
  modified_base 95: mod_base = OTHER; note = 2'-O-methylcytidine
  modified_base 109: mod_base = OTHER; note = 2'-O-methyluridine
  modified_base 113: mod_base = OTHER; note = 2'-O-methylcytidine
  modified_base 117: mod_base = OTHER; note = 2'-O-methyluridine
  modified_base 118: mod_base = OTHER; note = 2'-O-methyladenosine phosphorothioate
  modified_base 119: mod_base = OTHER; note = 2'-O-methyladenosine phosphorothioate
  modified_base 120: mod_base = OTHER; note = 2'-O-methyladenosine

SEQ ID NO: 303 - RNA, 120 nt, synthetic construct; identical to SEQ ID NO: 2
  source 1..120: mol_type = other RNA
  modified_base 1: mod_base = OTHER; note = 2'-O-methylguanosine phosphorothioate
  modified_base 2: mod_base = OTHER; note = 2'-O-methyluridine phosphorothioate
  modified_base 3: mod_base = OTHER; note = 2'-O-methyluridine phosphorothioate
  modified_base 4: mod_base = OTHER; note = 2'-O-methylcytidine
  modified_base 5: mod_base = OTHER; note = 2'-O-methyluridine
  modified_base 6: mod_base = OTHER; note = 2'-O-methylguanosine
  modified_base 7: mod_base = OTHER; note = 2'-O-methyluridine
  modified_base 11: mod_base = OTHER; note = 2'-O-methyluridine
  modified_base 16: mod_base = OTHER; note = 2'-O-methylcytidine
  modified_base 17: mod_base = OTHER; note = 2'-O-methyladenosine
  modified_base 18: mod_base = OTHER; note = 2'-O-methylguanosine
  modified_base 19: mod_base = OTHER; note = 2'-O-methylguanosine
  modified_base 20: mod_base = OTHER; note = 2'-O-methyladenosine
  modified_base 21: mod_base = OTHER; note = 2'-O-methylcytidine
  modified_base 25: mod_base = OTHER; note = 2'-O-methylcytidine
  modified_base 26: mod_base = OTHER; note = 2'-O-methylguanosine
  modified_base 27: mod_base = OTHER; note = 2'-O-methyluridine
  modified_base 28: mod_base = OTHER; note = 2'-O-methylcytidine
  modified_base 29: mod_base = OTHER; note = 2'-O-methyluridine
  modified_base 30: mod_base = OTHER; note = 2'-O-methyladenosine
  modified_base 31: mod_base = OTHER; note = 2'-O-methylguanosine
  modified_base 39: mod_base = OTHER; note = 2'-O-methyluridine
  modified_base 42: mod_base = OTHER; note = 2'-O-methyluridine
  modified_base 45: mod_base = OTHER; note = 2'-O-methyladenosine
  modified_base 46: mod_base = OTHER; note = 2'-O-methylguanosine
  modified_base 47: mod_base = OTHER; note = 2'-O-methylguanosine
  modified_base 48: mod_base = OTHER; note = 2'-O-methylguanosine
  modified_base 49: mod_base = OTHER; note = 2'-O-methyluridine
  modified_base 50: mod_base = OTHER; note = 2'-O-methylguanosine
  modified_base 51: mod_base = OTHER; note = 2'-O-methyluridine
  modified_base 52: mod_base = OTHER; note = 2'-O-methylguanosine
  modified_base 57: mod_base = OTHER; note = 2'-O-methyladenosine
  modified_base 58: mod_base = OTHER; note = 2'-O-methylcytidine
  modified_base 59: mod_base = OTHER; note = 2'-O-methyluridine
  modified_base 60: mod_base = OTHER; note = 2'-O-methylcytidine
  modified_base 61: mod_base = OTHER; note = 2'-O-methylcytidine
  modified_base 62: mod_base = OTHER; note = 2'-O-methyluridine
  modified_base 64: mod_base = OTHER; note = 2'-O-methyluridine
  modified_base 65: mod_base = OTHER; note = 2'-O-methyluridine
  modified_base 70: mod_base = OTHER; note = 2'-O-methylguanosine
  modified_base 71: mod_base = OTHER; note = 2'-O-methyladenosine
  modified_base 72: mod_base = OTHER; note = 2'-O-methylcytidine
  modified_base 73: mod_base = OTHER; note = 2'-O-methylguanosine
  modified_base 74: mod_base = OTHER; note = 2'-O-methyladenosine
  modified_base 75: mod_base = OTHER; note = 2'-O-methyluridine
  modified_base 76: mod_base = OTHER; note = 2'-O-methylguanosine
  modified_base 77: mod_base = OTHER; note = 2'-O-methyluridine
  modified_base 78: mod_base = OTHER; note = 2'-O-methylcytidine
  modified_base 79: mod_base = OTHER; note = 2'-O-methyluridine
  modified_base 80: mod_base = OTHER; note = 2'-O-methylcytidine
  modified_base 81: mod_base = OTHER; note = 2'-O-methyluridine
  modified_base 82: mod_base = OTHER; note = 2'-O-methyluridine
  modified_base 83: mod_base = OTHER; note = 2'-O-methyladenosine
  modified_base 84: mod_base = OTHER; note = 2'-O-methylcytidine
  modified_base 85: mod_base = OTHER; note = 2'-O-methylguanosine
  modified_base 86: mod_base = OTHER; note = 2'-O-methyladenosine
  modified_base 87: mod_base = OTHER; note = 2'-O-methylguanosine
  modified_base 117: mod_base = OTHER; note = 2'-O-methyluridine
  modified_base 118: mod_base = OTHER; note = 2'-O-methyladenosine phosphorothioate
  modified_base 119: mod_base = OTHER; note = 2'-O-methyladenosine phosphorothioate
  modified_base 120: mod_base = OTHER; note = 2'-O-methyladenosine

SEQ ID NO: 304 - RNA, 120 nt, synthetic construct; identical to SEQ ID NO: 2
  source 1..120: mol_type = other RNA
  modified_base 1: mod_base = OTHER; note = 2'-O-methylguanosine phosphorothioate
  modified_base 2: mod_base = OTHER; note = 2'-O-methyluridine phosphorothioate
  modified_base 3: mod_base = OTHER; note = 2'-O-methyluridine phosphorothioate
  modified_base 4: mod_base = OTHER; note = 2'-O-methylcytidine
  modified_base 5: mod_base = OTHER; note = 2'-O-methyluridine
  modified_base 6: mod_base = OTHER; note = 2'-O-methylguanosine
  modified_base 7: mod_base = OTHER; note = 2'-O-methyluridine
  modified_base 11: mod_base = OTHER; note = 2'-O-methyluridine
  modified_base 16: mod_base = OTHER; note = 2'-O-methylcytidine
  modified_base 17: mod_base = OTHER; note = 2'-O-methyladenosine
  modified_base 18: mod_base = OTHER; note = 2'-O-methylguanosine
  modified_base 19: mod_base = OTHER; note = 2'-O-methylguanosine
  modified_base 20: mod_base = OTHER; note = 2'-O-methyladenosine
  modified_base 21: mod_base = OTHER; note = 2'-O-methylcytidine
  modified_base 25: mod_base = OTHER; note = 2'-O-methylcytidine
  modified_base 26: mod_base = OTHER; note = 2'-O-methylguanosine
  modified_base 27: mod_base = OTHER; note = 2'-O-methyluridine
  modified_base 28: mod_base = OTHER; note = 2'-O-methylcytidine
  modified_base 29: mod_base = OTHER; note = 2'-O-methyluridine
  modified_base 30: mod_base = OTHER; note = 2'-O-methyladenosine
  modified_base 31: mod_base = OTHER; note = 2'-O-methylguanosine
  modified_base 45: mod_base = OTHER; note = 2'-O-methyladenosine
  modified_base 46: mod_base = OTHER; note = 2'-O-methylguanosine
  modified_base 47: mod_base = OTHER; note = 2'-O-methylguanosine
  modified_base 48: mod_base = OTHER; note = 2'-O-methylguanosine
  modified_base 49: mod_base = OTHER; note = 2'-O-methyluridine
  modified_base 50: mod_base = OTHER; note = 2'-O-methylguanosine
  modified_base 51: mod_base = OTHER; note = 2'-O-methyluridine
  modified_base 52: mod_base = OTHER; note = 2'-O-methylguanosine
  modified_base 57: mod_base = OTHER; note = 2'-O-methyladenosine
  modified_base 58: mod_base = OTHER; note = 2'-O-methylcytidine
  modified_base 59: mod_base = OTHER; note = 2'-O-methyluridine
  modified_base 60: mod_base = OTHER; note = 2'-O-methylcytidine
  modified_base 61: mod_base = OTHER; note = 2'-O-methylcytidine
  modified_base 62: mod_base = OTHER; note = 2'-O-methyluridine
  modified_base 64: mod_base = OTHER; note = 2'-O-methyluridine
  modified_base 65: mod_base = OTHER; note = 2'-O-methyluridine
  modified_base 70: mod_base = OTHER; note = 2'-O-methylguanosine
  modified_base 71: mod_base = OTHER; note = 2'-O-methyladenosine
  modified_base 72: mod_base = OTHER; note = 2'-O-methylcytidine
  modified_base 73: mod_base = OTHER; note = 2'-O-methylguanosine
  modified_base 74: mod_base = OTHER; note = 2'-O-methyladenosine
  modified_base 75: mod_base = OTHER; note = 2'-O-methyluridine
  modified_base 76: mod_base = OTHER; note = 2'-O-methylguanosine
  modified_base 77: mod_base = OTHER; note = 2'-O-methyluridine
  modified_base 78: mod_base = OTHER; note = 2'-O-methylcytidine
  modified_base 79: mod_base = OTHER; note = 2'-O-methyluridine
  modified_base 80: mod_base = OTHER; note = 2'-O-methylcytidine
  modified_base 81: mod_base = OTHER; note = 2'-O-methyluridine
  modified_base 82: mod_base = OTHER; note = 2'-O-methyluridine
  modified_base 83: mod_base = OTHER; note = 2'-O-methyladenosine
  modified_base 84: mod_base = OTHER; note = 2'-O-methylcytidine
  modified_base 85: mod_base = OTHER; note = 2'-O-methylguanosine
  modified_base 86: mod_base = OTHER; note = 2'-O-methyladenosine
  modified_base 87: mod_base = OTHER; note = 2'-O-methylguanosine
  modified_base 117: mod_base = OTHER; note = 2'-O-methyluridine
  modified_base 118: mod_base = OTHER; note = 2'-O-methyladenosine phosphorothioate
  modified_base 119: mod_base = OTHER; note = 2'-O-methyladenosine phosphorothioate
  modified_base 120: mod_base = OTHER; note = 2'-O-methyladenosine

SEQ ID NO: 305 - RNA, 120 nt, synthetic construct; identical to SEQ ID NO: 2
  source 1..120: mol_type = other RNA
  modified_base 1: mod_base = OTHER; note = 2'-O-methylguanosine phosphorothioate
  modified_base 2: mod_base = OTHER; note = 2'-O-methyluridine phosphorothioate
  modified_base 3: mod_base = OTHER; note = 2'-O-methyluridine phosphorothioate
  modified_base 25: mod_base = OTHER; note = 2'-O-methylcytidine
  modified_base 26: mod_base = OTHER; note = 2'-O-methylguanosine
  modified_base 27: mod_base = OTHER; note = 2'-O-methyluridine
  modified_base 28: mod_base = OTHER; note = 2'-O-methylcytidine
  modified_base 29: mod_base = OTHER; note = 2'-O-methyluridine
  modified_base 30: mod_base = OTHER; note = 2'-O-methyladenosine
  modified_base 31: mod_base = OTHER; note = 2'-O-methylguanosine
  modified_base 39: mod_base = OTHER; note = 2'-O-methyluridine
  modified_base 42: mod_base = OTHER; note = 2'-O-methyluridine
  modified_base 45: mod_base = OTHER; note = 2'-O-methyladenosine
  modified_base 46: mod_base = OTHER; note = 2'-O-methylguanosine
  modified_base 47: mod_base = OTHER; note = 2'-O-methylguanosine
  modified_base 48: mod_base = OTHER; note = 2'-O-methylguanosine
  modified_base 49: mod_base = OTHER; note = 2'-O-methyluridine
  modified_base 50: mod_base = OTHER; note = 2'-O-methylguanosine
  modified_base 51: mod_base = OTHER; note = 2'-O-methyluridine
  modified_base 52: mod_base = OTHER; note = 2'-O-methylguanosine
  modified_base 57: mod_base = OTHER; note = 2'-O-methyladenosine
  modified_base 58: mod_base = OTHER; note = 2'-O-methylcytidine
  modified_base 59: mod_base = OTHER; note = 2'-O-methyluridine
  modified_base 60: mod_base = OTHER; note = 2'-O-methylcytidine
  modified_base 61: mod_base = OTHER; note = 2'-O-methylcytidine
  modified_base 62: mod_base = OTHER; note = 2'-O-methyluridine
  modified_base 64: mod_base = OTHER; note = 2'-O-methyluridine
  modified_base 65: mod_base = OTHER; note = 2'-O-methyluridine
  modified_base 70: mod_base = OTHER; note = 2'-O-methylguanosine
  modified_base 71: mod_base = OTHER; note = 2'-O-methyladenosine
  modified_base 72: mod_base = OTHER; note = 2'-O-methylcytidine
  modified_base 73: mod_base = OTHER; note = 2'-O-methylguanosine
  modified_base 74: mod_base = OTHER; note = 2'-O-methyladenosine
  modified_base 75: mod_base = OTHER; note = 2'-O-methyluridine
  modified_base 76: mod_base = OTHER; note = 2'-O-methylguanosine
  modified_base 77: mod_base = OTHER; note = 2'-O-methyluridine
  modified_base 78: mod_base = OTHER; note = 2'-O-methylcytidine
  modified_base 79: mod_base = OTHER; note = 2'-O-methyluridine
  modified_base 80: mod_base = OTHER; note = 2'-O-methylcytidine
  modified_base 81: mod_base = OTHER; note = 2'-O-methyluridine
  modified_base 82: mod_base = OTHER; note = 2'-O-methyluridine
  modified_base 83: mod_base = OTHER; note = 2'-O-methyladenosine
  modified_base 84: mod_base = OTHER; note = 2'-O-methylcytidine
  modified_base 85: mod_base = OTHER; note = 2'-O-methylguanosine
  modified_base 86: mod_base = OTHER; note = 2'-O-methyladenosine
  modified_base 87: mod_base = OTHER; note = 2'-O-methylguanosine
  modified_base 117: mod_base = OTHER; note = 2'-O-methyluridine
  modified_base 118: mod_base = OTHER; note = 2'-O-methyladenosine phosphorothioate
  modified_base 119: mod_base = OTHER; note = 2'-O-methyladenosine phosphorothioate
  modified_base 120: mod_base = OTHER; note = 2'-O-methyladenosine

SEQ ID NO: 306 - RNA, 120 nt, synthetic construct; identical to SEQ ID NO: 2
  source 1..120: mol_type = other RNA
  modified_base 1: mod_base = OTHER; note = 2'-O-methylguanosine phosphorothioate
  modified_base 2: mod_base = OTHER; note = 2'-O-methyluridine phosphorothioate
  modified_base 3: mod_base = OTHER; note = 2'-O-methyluridine phosphorothioate
  modified_base 4: mod_base = OTHER; note = 2'-O-methylcytidine
  modified_base 5: mod_base = OTHER; note = 2'-O-methyluridine
  modified_base 6: mod_base = OTHER; note = 2'-O-methylguanosine
  modified_base 7: mod_base = OTHER; note = 2'-O-methyluridine
  modified_base 11: mod_base = OTHER; note = 2'-O-methyluridine
  modified_base 16: mod_base = OTHER; note = 2'-O-methylcytidine
  modified_base 17: mod_base = OTHER; note = 2'-O-methyladenosine
  modified_base 18: mod_base = OTHER; note = 2'-O-methylguanosine
  modified_base 19: mod_base = OTHER; note = 2'-O-methylguanosine
  modified_base 20: mod_base = OTHER; note = 2'-O-methyladenosine
  modified_base 21: mod_base = OTHER; note = 2'-O-methylcytidine
  modified_base 25: mod_base = OTHER; note = 2'-O-methylcytidine
  modified_base 26: mod_base = OTHER; note = 2'-O-methylguanosine
  modified_base 27: mod_base = OTHER; note = 2'-O-methyluridine
  modified_base 28: mod_base = OTHER; note = 2'-O-methylcytidine
  modified_base 29: mod_base = OTHER; note = 2'-O-methyluridine
  modified_base 30: mod_base = OTHER; note = 2'-O-methyladenosine
  modified_base 31: mod_base = OTHER; note = 2'-O-methylguanosine
  modified_base 39: mod_base = OTHER; note = 2'-O-methyluridine
  modified_base 42: mod_base = OTHER; note = 2'-O-methyluridine
  modified_base 64: mod_base = OTHER; note = 2'-O-methyluridine
  modified_base 65: mod_base = OTHER; note = 2'-O-methyluridine
  modified_base 70: mod_base = OTHER; note = 2'-O-methylguanosine
  modified_base 71: mod_base = OTHER; note = 2'-O-methyladenosine
  modified_base 72: mod_base = OTHER; note = 2'-O-methylcytidine
  modified_base 73: mod_base = OTHER; note = 2'-O-methylguanosine
  modified_base 74: mod_base = OTHER; note = 2'-O-methyladenosine
  modified_base 75: mod_base = OTHER; note = 2'-O-methyluridine
  modified_base 76: mod_base = OTHER; note = 2'-O-methylguanosine
  modified_base 77: mod_base = OTHER; note = 2'-O-methyluridine
  modified_base 78: mod_base = OTHER; note = 2'-O-methylcytidine
  modified_base 79: mod_base = OTHER; note = 2'-O-methyluridine
  modified_base 80: mod_base = OTHER; note = 2'-O-methylcytidine
  modified_base 81: mod_base = OTHER; note = 2'-O-methyluridine
  modified_base 82: mod_base = OTHER; note = 2'-O-methyluridine
  modified_base 83: mod_base = OTHER; note = 2'-O-methyladenosine
  modified_base 84: mod_base = OTHER; note = 2'-O-methylcytidine
  modified_base 85: mod_base = OTHER; note = 2'-O-methylguanosine
  modified_base 86: mod_base = OTHER; note = 2'-O-methyladenosine
  modified_base 87: mod_base = OTHER; note = 2'-O-methylguanosine
  modified_base 117: mod_base = OTHER; note = 2'-O-methyluridine
  modified_base 118: mod_base = OTHER; note = 2'-O-methyladenosine phosphorothioate
  modified_base 119: mod_base = OTHER; note = 2'-O-methyladenosine phosphorothioate
  modified_base 120: mod_base = OTHER; note = 2'-O-methyladenosine

SEQ ID NO: 307 - RNA, 120 nt, synthetic construct; identical to SEQ ID NO: 2
  source 1..120: mol_type = other RNA
  modified_base 1: mod_base = OTHER; note = 2'-O-methylguanosine phosphorothioate
  modified_base 2: mod_base = OTHER; note = 2'-O-methyluridine phosphorothioate
  modified_base 3: mod_base = OTHER; note = 2'-O-methyluridine phosphorothioate
  modified_base 98: mod_base = OTHER; note = 2'-O-methyladenosine
  modified_base 104: mod_base = OTHER; note = 2'-O-methylcytidine
  modified_base 105: mod_base = OTHER; note = 2'-O-methyladenosine
  modified_base 109: mod_base = OTHER; note = 2'-O-methyluridine
  modified_base 110: mod_base = OTHER; note = 2'-O-methyladenosine
  modified_base 117: mod_base = OTHER; note = 2'-O-methyluridine
  modified_base 118: mod_base = OTHER; note = 2'-O-methyladenosine phosphorothioate
  modified_base 119: mod_base = OTHER; note = 2'-O-methyladenosine phosphorothioate
  modified_base 120: mod_base = OTHER; note = 2'-O-methyladenosine

SEQ ID NO: 308 - RNA, 120 nt, synthetic construct; identical to SEQ ID NO: 2
  source 1..120: mol_type = other RNA
  modified_base 1: mod_base = OTHER; note = 2'-O-methylguanosine phosphorothioate
  modified_base 2: mod_base = OTHER; note = 2'-O-methyluridine phosphorothioate
  modified_base 3: mod_base = OTHER; note = 2'-O-methyluridine phosphorothioate
  modified_base 4: mod_base = OTHER; note = 2'-O-methylcytidine
  modified_base 5: mod_base = OTHER; note = 2'-O-methyluridine
  modified_base 6: mod_base = OTHER; note = 2'-O-methylguanosine
  modified_base 7: mod_base = OTHER; note = 2'-O-methyluridine
  modified_base 11: mod_base = OTHER; note = 2'-O-methyluridine
  modified_base 16: mod_base = OTHER; note = 2'-O-methylcytidine
  modified_base 17: mod_base = OTHER; note = 2'-O-methyladenosine
  modified_base 18: mod_base = OTHER; note = 2'-O-methylguanosine
  modified_base 19: mod_base = OTHER; note = 2'-O-methylguanosine
  modified_base 20: mod_base = OTHER; note = 2'-O-methyladenosine
  modified_base 21: mod_base = OTHER; note = 2'-O-methylcytidine
  modified_base 25: mod_base = OTHER; note = 2'-O-methylcytidine
  modified_base 26: mod_base = OTHER; note = 2'-O-methylguanosine
  modified_base 27: mod_base = OTHER; note = 2'-O-methyluridine
  modified_base 28: mod_base = OTHER; note = 2'-O-methylcytidine
  modified_base 29: mod_base = OTHER; note = 2'-O-methyluridine
  modified_base 30: mod_base = OTHER; note = 2'-O-methyladenosine
  modified_base 31: mod_base = OTHER; note = 2'-O-methylguanosine
  modified_base 39: mod_base = OTHER; note = 2'-O-methyluridine
  modified_base 42: mod_base = OTHER; note = 2'-O-methyluridine
  modified_base 45: mod_base = OTHER; note = 2'-O-methyladenosine
  modified_base 46: mod_base = OTHER; note = 2'-O-methylguanosine
  modified_base 47: mod_base = OTHER; note = 2'-O-methylguanosine
  modified_base 48: mod_base = OTHER; note = 2'-O-methylguanosine
  modified_base 49: mod_base = OTHER; note = 2'-O-methyluridine
  modified_base 50: mod_base = OTHER; note = 2'-O-methylguanosine
  modified_base 51: mod_base = OTHER; note = 2'-O-methyluridine
  modified_base 52: mod_base = OTHER; note = 2'-O-methylguanosine
  modified_base 57: mod_base = OTHER; note = 2'-O-methyladenosine
  modified_base 58: mod_base = OTHER; note = 2'-O-methylcytidine
  modified_base 59: mod_base = OTHER; note = 2'-O-methyluridine
  modified_base 60: mod_base = OTHER; note = 2'-O-methylcytidine
  modified_base 61: mod_base = OTHER; note = 2'-O-methylcytidine
  modified_base 62: mod_base = OTHER; note = 2'-O-methyluridine
  modified_base 64: mod_base = OTHER; note = 2'-O-methyluridine
  modified_base 65: mod_base = OTHER; note = 2'-O-methyluridine
  modified_base 70: mod_base = OTHER; note = 2'-O-methylguanosine
  modified_base 71: mod_base = OTHER; note = 2'-O-methyladenosine
  modified_base 72: mod_base = OTHER; note = 2'-O-methylcytidine
  modified_base 73: mod_base = OTHER; note = 2'-O-methylguanosine
  modified_base 74: mod_base = OTHER; note = 2'-O-methyladenosine
  modified_base 75: mod_base = OTHER; note = 2'-O-methyluridine
  modified_base 76: mod_base = OTHER; note = 2'-O-methylguanosine
  modified_base 77: mod_base = OTHER; note = 2'-O-methyluridine
  modified_base 78: mod_base = OTHER; note = 2'-O-methylcytidine
  modified_base 79: mod_base = OTHER; note = 2'-O-methyluridine
  modified_base 80: mod_base = OTHER; note = 2'-O-methylcytidine
  modified_base 81: mod_base = OTHER; note = 2'-O-methyluridine
  modified_base 82: mod_base = OTHER; note = 2'-O-methyluridine
  modified_base 83: mod_base = OTHER; note = 2'-O-methyladenosine
  modified_base 84: mod_base = OTHER; note = 2'-O-methylcytidine
  modified_base 85: mod_base = OTHER; note = 2'-O-methylguanosine
  modified_base 86: mod_base = OTHER; note = 2'-O-methyladenosine
  modified_base 87: mod_base = OTHER; note = 2'-O-methylguanosine
  modified_base 98: mod_base = OTHER; note = 2'-O-methyladenosine
  modified_base 104: mod_base = OTHER; note = 2'-O-methylcytidine
  modified_base 105: mod_base = OTHER; note = 2'-O-methyladenosine
  modified_base 109: mod_base = OTHER; note = 2'-O-methyluridine
  modified_base 110: mod_base = OTHER; note = 2'-O-methyladenosine
  modified_base 117: mod_base = OTHER; note = 2'-O-methyluridine
  modified_base 118: mod_base = OTHER; note = 2'-O-methyladenosine phosphorothioate
  modified_base 119: mod_base = OTHER; note = 2'-O-methyladenosine phosphorothioate
  modified_base 120: mod_base = OTHER; note = 2'-O-methyladenosine

SEQ ID NO: 309 - RNA, 120 nt, synthetic construct; identical to SEQ ID NO: 2
  source 1..120: mol_type = other RNA
  modified_base 1: mod_base = OTHER; note = 2'-O-methylguanosine phosphorothioate
  modified_base 2: mod_base = OTHER; note = 2'-O-methyluridine phosphorothioate
  modified_base 3: mod_base = OTHER; note = 2'-O-methyluridine phosphorothioate
  modified_base 98: mod_base = OTHER; note = 2'-O-methyladenosine
  modified_base 101: mod_base = OTHER; note = 2'-O-methylcytidine
  modified_base 104: mod_base = OTHER; note = 2'-O-methylcytidine
  modified_base 105: mod_base = OTHER; note = 2'-O-methyladenosine
  modified_base 107: mod_base = OTHER; note = 2'-O-methylcytidine
  modified_base 109: mod_base = OTHER; note = 2'-O-methyluridine
  modified_base 110: mod_base = OTHER; note = 2'-O-methyladenosine
  modified_base 117: mod_base = OTHER; note = 2'-O-methyluridine
  modified_base 118: mod_base = OTHER; note = 2'-O-methyladenosine phosphorothioate
  modified_base 119: mod_base = OTHER; note = 2'-O-methyladenosine phosphorothioate
  modified_base 120: mod_base = OTHER; note = 2'-O-methyladenosine

SEQ ID NO: 310 - RNA, 120 nt, synthetic construct; identical to SEQ ID NO: 2
  source 1..120: mol_type = other RNA
  modified_base 1: mod_base = OTHER; note = 2'-O-methylguanosine phosphorothioate
  modified_base 2: mod_base = OTHER; note = 2'-O-methyluridine phosphorothioate
  modified_base 3: mod_base = OTHER; note = 2'-O-methyluridine phosphorothioate
  modified_base 4: mod_base = OTHER; note = 2'-O-methylcytidine
  modified_base 5: mod_base = OTHER; note = 2'-O-methyluridine
  modified_base 6: mod_base = OTHER; note = 2'-O-methylguanosine
  modified_base 7: mod_base = OTHER; note = 2'-O-methyluridine
  modified_base 11: mod_base = OTHER; note = 2'-O-methyluridine
  modified_base 16: mod_base = OTHER; note = 2'-O-methylcytidine
  modified_base 17: mod_base = OTHER; note = 2'-O-methyladenosine
  modified_base 18: mod_base = OTHER; note = 2'-O-methylguanosine
  modified_base 19: mod_base = OTHER; note = 2'-O-methylguanosine
  modified_base 20: mod_base = OTHER; note = 2'-O-methyladenosine
  modified_base 21: mod_base = OTHER; note = 2'-O-methylcytidine
  modified_base 25: mod_base = OTHER; note = 2'-O-methylcytidine
  modified_base 26: mod_base = OTHER; note = 2'-O-methylguanosine
  modified_base 27: mod_base = OTHER; note = 2'-O-methyluridine
  modified_base 28: mod_base = OTHER; note = 2'-O-methylcytidine
  modified_base 29: mod_base = OTHER; note = 2'-O-methyluridine
  modified_base 30: mod_base = OTHER; note = 2'-O-methyladenosine
  modified_base 31: mod_base = OTHER; note = 2'-O-methylguanosine
  modified_base 33: mod_base = OTHER; note = 2'-O-methyluridine
  modified_base 39: mod_base = OTHER; note = 2'-O-methyluridine
  modified_base 42: mod_base = OTHER; note = 2'-O-methyluridine
  modified_base 45: mod_base = OTHER; note = 2'-O-methyladenosine
  modified_base 46: mod_base = OTHER; note = 2'-O-methylguanosine
  modified_base 47: mod_base = OTHER; note = 2'-O-methylguanosine
  modified_base 48: mod_base = OTHER; note = 2'-O-methylguanosine
  modified_base 49: mod_base = OTHER; note = 2'-O-methyluridine
  modified_base 50: mod_base = OTHER; note = 2'-O-methylguanosine
  modified_base 51: mod_base = OTHER; note = 2'-O-methyluridine
  modified_base 52: mod_base = OTHER; note = 2'-O-methylguanosine
  modified_base 57: mod_base = OTHER; note = 2'-O-methyladenosine
  modified_base 58: mod_base = OTHER; note = 2'-O-methylcytidine
  modified_base 59: mod_base = OTHER; note = 2'-O-methyluridine
  modified_base 60: mod_base = OTHER; note = 2'-O-methylcytidine
  modified_base 61: mod_base = OTHER; note = 2'-O-methylcytidine
  modified_base 62: mod_base = OTHER; note = 2'-O-methyluridine
  modified_base 64: mod_base = OTHER; note = 2'-O-methyluridine
  modified_base 65: mod_base = OTHER; note = 2'-O-methyluridine
  modified_base 70: mod_base = OTHER; note = 2'-O-methylguanosine
  modified_base 71: mod_base = OTHER; note = 2'-O-methyladenosine
  modified_base 72: mod_base = OTHER; note = 2'-O-methylcytidine
  modified_base 73: mod_base = OTHER; note = 2'-O-methylguanosine
  modified_base 74: mod_base = OTHER; note = 2'-O-methyladenosine
  modified_base 75: mod_base = OTHER; note = 2'-O-methyluridine
  modified_base 76: mod_base = OTHER; note = 2'-O-methylguanosine
  modified_base 77: mod_base = OTHER; note = 2'-O-methyluridine
  modified_base 78: mod_base = OTHER; note = 2'-O-methylcytidine
  modified_base 79: mod_base = OTHER; note = 2'-O-methyluridine
  modified_base 80: mod_base = OTHER; note = 2'-O-methylcytidine
  modified_base 81: mod_base = OTHER; note = 2'-O-methyluridine
  modified_base 82: mod_base = OTHER; note = 2'-O-methyluridine
  modified_base 83: mod_base = OTHER; note = 2'-O-methyladenosine
  modified_base 84: mod_base = OTHER; note = 2'-O-methylcytidine
  modified_base 85: mod_base = OTHER; note = 2'-O-methylguanosine
  modified_base 86: mod_base = OTHER; note = 2'-O-methyladenosine
  modified_base 87: mod_base = OTHER; note = 2'-O-methylguanosine
  modified_base 89: mod_base = OTHER; note = 2'-O-methylcytidine
  modified_base 98: mod_base = OTHER; note = 2'-O-methyladenosine
  modified_base 101: mod_base = OTHER; note = 2'-O-methylcytidine
  modified_base 104: mod_base = OTHER; note = 2'-O-methylcytidine
  modified_base 105: mod_base = OTHER; note = 2'-O-methyladenosine
  modified_base 107: mod_base = OTHER; note = 2'-O-methylcytidine
  modified_base 109: mod_base = OTHER; note = 2'-O-methyluridine
  modified_base 110: mod_base = OTHER; note = 2'-O-methyladenosine
  modified_base 117: mod_base = OTHER; note = 2'-O-methyluridine
  modified_base 118: mod_base = OTHER; note = 2'-O-methyladenosine phosphorothioate
  modified_base 119: mod_base = OTHER; note = 2'-O-methyladenosine phosphorothioate
  modified_base 120: mod_base = OTHER; note = 2'-O-methyladenosine

SEQ ID NO: 311 - RNA, 124 nt, synthetic construct; identical to SEQ ID NO: 1
  source 1..124: mol_type = other RNA
  modified_base 1: mod_base = OTHER; note = 2'-O-methylguanosine phosphorothioate
  modified_base 2: mod_base = OTHER; note = 2'-O-methyluridine phosphorothioate
  modified_base 3: mod_base = OTHER; note = 2'-O-methyluridine phosphorothioate
  modified_base 4: mod_base = OTHER; note = 2'-O-methylcytidine
  modified_base 5: mod_base = OTHER; note = 2'-O-methyluridine
  modified_base 6: mod_base = OTHER; note = 2'-O-methylguanosine
  modified_base 7: mod_base = OTHER; note = 2'-O-methyluridine
  modified_base 11: mod_base = OTHER; note = 2'-O-methyluridine
  modified_base 16: mod_base = OTHER; note = 2'-O-methylcytidine
  modified_base 17: mod_base = OTHER; note = 2'-O-methyladenosine
  modified_base 18: mod_base = OTHER; note = 2'-O-methylguanosine
  modified_base 19: mod_base = OTHER; note = 2'-O-methylguanosine
  modified_base 20: mod_base = OTHER; note = 2'-O-methyladenosine
  modified_base 21: mod_base = OTHER; note = 2'-O-methylcytidine
  modified_base 25: mod_base = OTHER; note = 2'-O-methylcytidine
  modified_base 26: mod_base = OTHER; note = 2'-O-methylguanosine
  modified_base 27: mod_base = OTHER; note = 2'-O-methyluridine
  modified_base 28: mod_base = OTHER; note = 2'-O-methylcytidine
  modified_base 29: mod_base = OTHER; note = 2'-O-methyluridine
  modified_base 30: mod_base = OTHER; note = 2'-O-methyladenosine
  modified_base 31: mod_base = OTHER; note = 2'-O-methylguanosine
  modified_base 39: mod_base = OTHER; note = 2'-O-methyluridine
  modified_base 42: mod_base = OTHER; note = 2'-O-methyluridine
  modified_base 45: mod_base = OTHER; note = 2'-O-methyladenosine
  modified_base 46: mod_base = OTHER; note = 2'-O-methylguanosine
  modified_base 47: mod_base = OTHER; note = 2'-O-methylguanosine
  modified_base 48: mod_base = OTHER; note = 2'-O-methylguanosine
  modified_base 49: mod_base = OTHER; note = 2'-O-methyluridine
  modified_base 50: mod_base = OTHER; note = 2'-O-methylguanosine
  modified_base 51: mod_base = OTHER; note = 2'-O-methyluridine
  modified_base 52: mod_base = OTHER; note = 2'-O-methylguanosine
  modified_base 57: mod_base = OTHER; note = 2'-O-methyladenosine
  modified_base 58: mod_base = OTHER; note = 2'-O-methylcytidine
  modified_base 59: mod_base = OTHER; note = 2'-O-methyluridine
  modified_base 60: mod_base = OTHER; note = 2'-O-methylcytidine
  modified_base 61: mod_base = OTHER; note = 2'-O-methylcytidine
  modified_base 62: mod_base = OTHER; note = 2'-O-methyluridine
  modified_base 64: mod_base = OTHER; note = 2'-O-methyluridine
  modified_base 65: mod_base = OTHER; note = 2'-O-methyluridine
  modified_base 70: mod_base = OTHER; note = 2'-O-methylguanosine
  modified_base 71: mod_base = OTHER; note = 2'-O-methyladenosine
  modified_base 72: mod_base = OTHER; note = 2'-O-methylcytidine
  modified_base 73: mod_base = OTHER; note = 2'-O-methylguanosine
  modified_base 74: mod_base = OTHER; note = 2'-O-methyladenosine
  modified_base 75: mod_base = OTHER; note = 2'-O-methyluridine
  modified_base 76: mod_base = OTHER; note = 2'-O-methylguanosine
  modified_base 77: mod_base = OTHER; note = 2'-O-methyluridine
  modified_base 78: mod_base = OTHER; note = 2'-O-methylcytidine
  modified_base 79: mod_base = OTHER; note = 2'-O-methyluridine
  modified_base 80: mod_base = OTHER; note = 2'-O-methylcytidine
  modified_base 81: mod_base = OTHER; note = 2'-O-methyluridine
  modified_base 82: mod_base = OTHER; note = 2'-O-methyluridine
  modified_base 83: mod_base = OTHER; note = 2'-O-methyladenosine
  modified_base 84: mod_base = OTHER; note = 2'-O-methylcytidine
  modified_base 85: mod_base = OTHER; note = 2'-O-methylguanosine
  modified_base 86: mod_base = OTHER; note = 2'-O-methyladenosine
  modified_base 87: mod_base = OTHER; note = 2'-O-methylguanosine
  modified_base 117: mod_base = OTHER; note = 2'-O-methyluridine
  modified_base 121: mod_base = OTHER; note = 2'-O-methyluridine
  modified_base 122: mod_base = OTHER; note = 2'-O-methyluridine phosphorothioate
  modified_base 123: mod_base = OTHER; note = 2'-O-methyluridine phosphorothioate
  modified_base 124: mod_base = OTHER; note = 2'-O-methyluridine

SEQ ID NO: 312 - RNA, 124 nt, synthetic construct; identical to SEQ ID NO: 1
  source 1..124: mol_type = other RNA
  modified_base 1: mod_base = OTHER; note = 2'-O-methylguanosine phosphorothioate
  modified_base 2: mod_base = OTHER; note = 2'-O-methyluridine phosphorothioate
  modified_base 3: mod_base = OTHER; note = 2'-O-methyluridine phosphorothioate
  modified_base 98: mod_base = OTHER; note = 2'-O-methyladenosine
  modified_base 104: mod_base = OTHER; note = 2'-O-methylcytidine
  modified_base 105: mod_base = OTHER; note = 2'-O-methyladenosine
  modified_base 109: mod_base = OTHER; note = 2'-O-methyluridine
  modified_base 110: mod_base = OTHER; note = 2'-O-methyladenosine
  modified_base 117: mod_base = OTHER; note = 2'-O-methyluridine
  modified_base 118: mod_base = OTHER; note = 2'-O-methyladenosine
  modified_base 119: mod_base = OTHER; note = 2'-O-methyladenosine
  modified_base 120: mod_base = OTHER; note = 2'-O-methyladenosine
  modified_base 121: mod_base = OTHER; note = 2'-O-methyluridine
  modified_base 122: mod_base = OTHER; note = 2'-O-methyluridine phosphorothioate
  modified_base 123: mod_base = OTHER; note = 2'-O-methyluridine phosphorothioate
  modified_base 124: mod_base = OTHER; note = 2'-O-methyluridine

SEQ ID NO: 313 - RNA, 124 nt, synthetic construct; identical to SEQ ID NO: 1
  source 1..124: mol_type = other RNA
  modified_base 1: mod_base = OTHER; note = 2'-O-methylguanosine phosphorothioate
  modified_base 2: mod_base = OTHER; note = 2'-O-methyluridine phosphorothioate
  modified_base 3: mod_base = OTHER; note = 2'-O-methyluridine phosphorothioate
  modified_base 4: mod_base = OTHER; note = 2'-O-methylcytidine
  modified_base 5: mod_base = OTHER; note = 2'-O-methyluridine
  modified_base 6: mod_base = OTHER; note = 2'-O-methylguanosine
  modified_base 7: mod_base = OTHER; note = 2'-O-methyluridine
  modified_base 11: mod_base = OTHER; note = 2'-O-methyluridine
  modified_base 16: mod_base = OTHER; note = 2'-O-methylcytidine
  modified_base 17: mod_base = OTHER; note = 2'-O-methyladenosine
  modified_base 18: mod_base = OTHER; note = 2'-O-methylguanosine
  modified_base 19: mod_base = OTHER; note = 2'-O-methylguanosine
  modified_base 20: mod_base = OTHER; note = 2'-O-methyladenosine
  modified_base 21: mod_base = OTHER; note = 2'-O-methylcytidine
  modified_base 25: mod_base = OTHER; note = 2'-O-methylcytidine
  modified_base 26: mod_base = OTHER; note = 2'-O-methylguanosine
  modified_base 27: mod_base = OTHER; note = 2'-O-methyluridine
  modified_base 28: mod_base = OTHER; note = 2'-O-methylcytidine
  modified_base 29: mod_base = OTHER; note = 2'-O-methyluridine
  modified_base 30: mod_base = OTHER; note = 2'-O-methyladenosine
  modified_base 31: mod_base = OTHER; note = 2'-O-methylguanosine
  modified_base 39: mod_base = OTHER; note = 2'-O-methyluridine
  modified_base 42: mod_base = OTHER; note = 2'-O-methyluridine
  modified_base 45: mod_base = OTHER; note = 2'-O-methyladenosine
  modified_base 46: mod_base = OTHER; note = 2'-O-methylguanosine
  modified_base 47: mod_base = OTHER; note = 2'-O-methylguanosine
  modified_base 48: mod_base = OTHER; note = 2'-O-methylguanosine
  modified_base 49: mod_base = OTHER; note = 2'-O-methyluridine
  modified_base 50: mod_base = OTHER; note = 2'-O-methylguanosine
  modified_base 51: mod_base = OTHER; note = 2'-O-methyluridine
  modified_base 52: mod_base = OTHER; note = 2'-O-methylguanosine
  modified_base 57: mod_base = OTHER; note = 2'-O-methyladenosine
  modified_base 58: mod_base = OTHER; note = 2'-O-methylcytidine
  modified_base 59: mod_base = OTHER; note = 2'-O-methyluridine
  modified_base 60: mod_base = OTHER; note = 2'-O-methylcytidine
  modified_base 61: mod_base = OTHER; note = 2'-O-methylcytidine
  modified_base 62: mod_base = OTHER; note = 2'-O-methyluridine
  modified_base 64: mod_base = OTHER; note = 2'-O-methyluridine
  modified_base 65: mod_base = OTHER; note = 2'-O-methyluridine
  modified_base 70: mod_base = OTHER; note = 2'-O-methylguanosine
  modified_base 71: mod_base = OTHER; note = 2'-O-methyladenosine
  modified_base 72: mod_base = OTHER; note = 2'-O-methylcytidine
  modified_base 73: mod_base = OTHER; note = 2'-O-methylguanosine
  modified_base 74: mod_base = OTHER; note = 2'-O-methyladenosine
  modified_base 75: mod_base = OTHER; note = 2'-O-methyluridine
  modified_base 76: mod_base = OTHER; note = 2'-O-methylguanosine
  modified_base 77: mod_base = OTHER; note = 2'-O-methyluridine
  modified_base 78: mod_base = OTHER; note = 2'-O-methylcytidine
  modified_base 79: mod_base = OTHER; note = 2'-O-methyluridine
  modified_base 80: mod_base = OTHER; note = 2'-O-methylcytidine
  modified_base 81: mod_base = OTHER; note = 2'-O-methyluridine
  modified_base 82: mod_base = OTHER; note = 2'-O-methyluridine
  modified_base 83: mod_base = OTHER; note = 2'-O-methyladenosine
  modified_base 84: mod_base = OTHER; note = 2'-O-methylcytidine
  modified_base 85: mod_base = OTHER; note = 2'-O-methylguanosine
  modified_base 86: mod_base = OTHER; note = 2'-O-methyladenosine
  modified_base 87: mod_base = OTHER; note = 2'-O-methylguanosine
  modified_base 121: mod_base = OTHER; note = 2'-O-methyluridine
  modified_base 122: mod_base = OTHER; note = 2'-O-methyluridine phosphorothioate
  modified_base 123: mod_base = OTHER; note = 2'-O-methyluridine phosphorothioate
  modified_base 124: mod_base = OTHER; note = 2'-O-methyluridine

SEQ ID NO: 314 - RNA, 124 nt, synthetic construct; identical to SEQ ID NO: 1
  source 1..124: mol_type = other RNA
  modified_base 1: mod_base = OTHER; note = 2'-O-methylguanosine phosphorothioate
  modified_base 2: mod_base = OTHER; note = 2'-O-methyluridine phosphorothioate
  modified_base 3: mod_base = OTHER; note = 2'-O-methyluridine phosphorothioate
  modified_base 4: mod_base = OTHER; note = 2'-O-methylcytidine
  modified_base 5: mod_base = OTHER; note = 2'-O-methyluridine
  modified_base 6: mod_base = OTHER; note = 2'-O-methylguanosine
  modified_base 7: mod_base = OTHER; note = 2'-O-methyluridine
  modified_base 11: mod_base = OTHER; note = 2'-O-methyluridine
  modified_base 16: mod_base = OTHER; note = 2'-O-methylcytidine
  modified_base 17: mod_base = OTHER; note = 2'-O-methyladenosine
  modified_base 18: mod_base = OTHER; note = 2'-O-methylguanosine
  modified_base 19: mod_base = OTHER; note = 2'-O-methylguanosine
  modified_base 20: mod_base = OTHER; note = 2'-O-methyladenosine
  modified_base 21: mod_base = OTHER; note = 2'-O-methylcytidine
  modified_base 25: mod_base = OTHER; note = 2'-O-methylcytidine
  modified_base 26: mod_base = OTHER; note = 2'-O-methylguanosine
  modified_base 27: mod_base = OTHER; note = 2'-O-methyluridine
  modified_base 28: mod_base = OTHER; note = 2'-O-methylcytidine
  modified_base 29: mod_base = OTHER; note = 2'-O-methyluridine
  modified_base 30: mod_base = OTHER; note = 2'-O-methyladenosine
  modified_base 31: mod_base = OTHER; note = 2'-O-methylguanosine
  modified_base 39: mod_base = OTHER; note = 2'-O-methyluridine
  modified_base 42: mod_base = OTHER; note = 2'-O-methyluridine
  modified_base 45: mod_base = OTHER; note = 2'-O-methyladenosine
  modified_base 46: mod_base = OTHER; note = 2'-O-methylguanosine
  modified_base 47: mod_base = OTHER; note = 2'-O-methylguanosine
  modified_base 48: mod_base = OTHER; note = 2'-O-methylguanosine
  modified_base 49: mod_base = OTHER; note = 2'-O-methyluridine
  modified_base 50: mod_base = OTHER; note = 2'-O-methylguanosine
  modified_base 51: mod_base = OTHER; note = 2'-O-methyluridine
  modified_base 52: mod_base = OTHER; note = 2'-O-methylguanosine
  modified_base 57: mod_base = OTHER; note = 2'-O-methyladenosine
  modified_base 58: mod_base = OTHER; note = 2'-O-methylcytidine
  modified_base 59: mod_base = OTHER; note = 2'-O-methyluridine
  modified_base 60: mod_base = OTHER; note = 2'-O-methylcytidine
  modified_base 61: mod_base = OTHER; note = 2'-O-methylcytidine
  modified_base 62: mod_base = OTHER; note = 2'-O-methyluridine
  modified_base 64: mod_base = OTHER; note = 2'-O-methyluridine
  modified_base 65: mod_base = OTHER; note = 2'-O-methyluridine
  modified_base 70: mod_base = OTHER; note = 2'-O-methylguanosine
  modified_base 71: mod_base = OTHER; note = 2'-O-methyladenosine
  modified_base 72: mod_base = OTHER; note = 2'-O-methylcytidine
  modified_base 73: mod_base = OTHER; note = 2'-O-methylguanosine
  modified_base 74: mod_base = OTHER; note = 2'-O-methyladenosine
  modified_base 75: mod_base = OTHER; note = 2'-O-methyluridine
  modified_base 76: mod_base = OTHER; note = 2'-O-methylguanosine
  modified_base 77: mod_base = OTHER; note = 2'-O-methyluridine
  modified_base 78: mod_base = OTHER; note = 2'-O-methylcytidine
  modified_base 79: mod_base = OTHER; note = 2'-O-methyluridine
  modified_base 80: mod_base = OTHER; note = 2'-O-methylcytidine
  modified_base 81: mod_base = OTHER; note = 2'-O-methyluridine
  modified_base 82: mod_base = OTHER; note = 2'-O-methyluridine
  modified_base 83: mod_base = OTHER; note = 2'-O-methyladenosine
  modified_base 84: mod_base = OTHER; note = 2'-O-methylcytidine
  modified_base 85: mod_base = OTHER; note = 2'-O-methylguanosine
  modified_base 86: mod_base = OTHER; note = 2'-O-methyladenosine
  modified_base 87: mod_base = OTHER; note = 2'-O-methylguanosine
  modified_base 117: mod_base = OTHER; note = 2'-O-methyluridine
  modified_base 118: mod_base = OTHER; note = 2'-O-methyladenosine
  modified_base 119: mod_base = OTHER; note = 2'-O-methyladenosine
  modified_base 120: mod_base = OTHER; note = 2'-O-methyladenosine
  modified_base 121: mod_base = OTHER; note = 2'-O-methyluridine
  modified_base 122: mod_base = OTHER; note = 2'-O-methyluridine phosphorothioate
  modified_base 123: mod_base = OTHER; note = 2'-O-methyluridine phosphorothioate
  modified_base 124: mod_base = OTHER; note = 2'-O-methyluridine

SEQ ID NO: 315 - RNA, 124 nt, synthetic construct; identical to SEQ ID NO: 1
  source 1..124: mol_type = other RNA
  modified_base 1: mod_base = OTHER; note = 2'-O-methylguanosine phosphorothioate
  modified_base 2: mod_base = OTHER; note = 2'-O-methyluridine phosphorothioate
  modified_base 3: mod_base = OTHER; note = 2'-O-methyluridine phosphorothioate
  modified_base 4: mod_base = OTHER; note = 2'-O-methylcytidine
  modified_base 5: mod_base = OTHER; note = 2'-O-methyluridine
  modified_base 6: mod_base = OTHER; note = 2'-O-methylguanosine
  modified_base 7: mod_base = OTHER; note = 2'-O-methyluridine
  modified_base 11: mod_base = OTHER; note = 2'-O-methyluridine
  modified_base 16: mod_base = OTHER; note = 2'-O-methylcytidine
  modified_base 17: mod_base = OTHER; note = 2'-O-methyladenosine
  modified_base 18: mod_base = OTHER; note = 2'-O-methylguanosine
  modified_base 19: mod_base = OTHER; note = 2'-O-methylguanosine
  modified_base 20: mod_base = OTHER; note = 2'-O-methyladenosine
  modified_base 21: mod_base = OTHER; note = 2'-O-methylcytidine
  modified_base 25: mod_base = OTHER; note = 2'-O-methylcytidine
  modified_base 26: mod_base = OTHER; note = 2'-O-methylguanosine
  modified_base 27: mod_base = OTHER; note = 2'-O-methyluridine
  modified_base 28: mod_base = OTHER; note = 2'-O-methylcytidine
  modified_base 29: mod_base = OTHER; note = 2'-O-methyluridine
  modified_base 30: mod_base = OTHER; note = 2'-O-methyladenosine
  modified_base 31: mod_base = OTHER; note = 2'-O-methylguanosine
  modified_base 39: mod_base = OTHER; note = 2'-O-methyluridine
  modified_base 42: mod_base = OTHER; note = 2'-O-methyluridine
  modified_base 45: mod_base = OTHER; note = 2'-O-methyladenosine
  modified_base 46: mod_base = OTHER; note = 2'-O-methylguanosine
  modified_base 47: mod_base = OTHER; note = 2'-O-methylguanosine
  modified_base 48: mod_base = OTHER; note = 2'-O-methylguanosine
  modified_base 49: mod_base = OTHER; note = 2'-O-methyluridine
  modified_base 50: mod_base = OTHER; note = 2'-O-methylguanosine
  modified_base 51: mod_base = OTHER; note = 2'-O-methyluridine
  modified_base 52: mod_base = OTHER; note = 2'-O-methylguanosine
  modified_base 57: mod_base = OTHER; note = 2'-O-methyladenosine
  modified_base 58: mod_base = OTHER; note = 2'-O-methylcytidine
  modified_base 59: mod_base = OTHER; note = 2'-O-methyluridine
  modified_base 60: mod_base = OTHER; note = 2'-O-methylcytidine
  modified_base 61: mod_base = OTHER; note = 2'-O-methylcytidine
  modified_base 62: mod_base = OTHER; note = 2'-O-methyluridine
  modified_base 64: mod_base = OTHER; note = 2'-O-methyluridine
  modified_base 65: mod_base = OTHER; note = 2'-O-methyluridine
  modified_base 70: mod_base = OTHER; note = 2'-O-methylguanosine
  modified_base 71: mod_base = OTHER; note = 2'-O-methyladenosine
  modified_base 72: mod_base = OTHER; note = 2'-O-methylcytidine
  modified_base 73: mod_base = OTHER; note = 2'-O-methylguanosine
  modified_base 74: mod_base = OTHER; note = 2'-O-methyladenosine
  modified_base 75: mod_base = OTHER; note = 2'-O-methyluridine
  modified_base 76: mod_base = OTHER; note = 2'-O-methylguanosine
  modified_base 77: mod_base = OTHER; note = 2'-O-methyluridine
  modified_base 78: mod_base = OTHER; note = 2'-O-methylcytidine
  modified_base 79: mod_base = OTHER; note = 2'-O-methyluridine
  modified_base 80: mod_base = OTHER; note = 2'-O-methylcytidine
  modified_base 81: mod_base = OTHER; note = 2'-O-methyluridine
  modified_base 82: mod_base = OTHER; note = 2'-O-methyluridine
  modified_base 83: mod_base = OTHER; note = 2'-O-methyladenosine
  modified_base 84: mod_base = OTHER; note = 2'-O-methylcytidine
  modified_base 85: mod_base = OTHER; note = 2'-O-methylguanosine
  modified_base 86: mod_base = OTHER; note = 2'-O-methyladenosine
  modified_base 87: mod_base = OTHER; note = 2'-O-methylguanosine
  modified_base 98: mod_base = OTHER; note = 2'-O-methyladenosine
  modified_base 104: mod_base = OTHER; note = 2'-O-methylcytidine
  modified_base 105: mod_base = OTHER; note = 2'-O-methyladenosine
  modified_base 109: mod_base = OTHER; note = 2'-O-methyluridine
  modified_base 110: mod_base = OTHER; note = 2'-O-methyladenosine
  modified_base 117: mod_base = OTHER; note = 2'-O-methyluridine
  modified_base 118: mod_base = OTHER; note = 2'-O-methyladenosine
  modified_base 119: mod_base = OTHER; note = 2'-O-methyladenosine
  modified_base 120: mod_base = OTHER; note = 2'-O-methyladenosine
  modified_base 121: mod_base = OTHER; note = 2'-O-methyluridine
  modified_base 122: mod_base = OTHER; note = 2'-O-methyluridine phosphorothioate
  modified_base 123: mod_base = OTHER; note = 2'-O-methyluridine phosphorothioate
  modified_base 124: mod_base = OTHER; note = 2'-O-methyluridine

SEQ ID NO: 316 - RNA, 120 nt, synthetic construct; identical to SEQ ID NO: 5
  source 1..120: mol_type = other RNA
  modified_base 1: mod_base = OTHER; note = 2'-O-methylguanosine phosphorothioate
  modified_base 2: mod_base = OTHER; note = 2'-O-methyluridine phosphorothioate
  modified_base 3: mod_base = OTHER; note = 2'-O-methyluridine phosphorothioate
  modified_base 98: mod_base = OTHER; note = 2'-O-methyladenosine
  modified_base 101: mod_base = OTHER; note = 2'-O-methyluridine
  modified_base 104: mod_base = OTHER; note = 2'-O-methyluridine
  modified_base 105: mod_base = OTHER; note = 2'-O-methylcytidine
  modified_base 108: mod_base = OTHER; note = 2'-O-methyluridine
  modified_base 109: mod_base = OTHER; note = 2'-O-methylguanosine
  modified_base 110: mod_base = OTHER; note = 2'-O-methylguanosine
  modified_base 115: mod_base = OTHER; note = 2'-O-methyluridine
  modified_base 117: mod_base = OTHER; note = 2'-O-methyladenosine
  modified_base 118: mod_base = OTHER; note = 2'-O-methyluridine phosphorothioate
  modified_base 119: mod_base = OTHER; note = 2'-O-methyluridine phosphorothioate
  modified_base 120: mod_base = OTHER; note = 2'-O-methylcytidine

SEQ ID NO: 317 - RNA, 120 nt, synthetic construct; identical to SEQ ID NO: 5
  source 1..120: mol_type = other RNA
  modified_base 1: mod_base = OTHER; note = 2'-O-methylguanosine phosphorothioate
  modified_base 2: mod_base = OTHER; note = 2'-O-methyluridine phosphorothioate
  modified_base 3: mod_base = OTHER; note = 2'-O-methyluridine phosphorothioate
  modified_base 104: mod_base = OTHER; note = 2'-O-methyluridine
  modified_base 105: mod_base = OTHER; note = 2'-O-methylcytidine
  modified_base 109: mod_base = OTHER; note = 2'-O-methylguanosine
  modified_base 110: mod_base = OTHER; note = 2'-O-methylguanosine
  modified_base 117: mod_base = OTHER; note = 2'-O-methyladenosine
  modified_base 118: mod_base = OTHER; note = 2'-O-methyluridine phosphorothioate
  modified_base 119: mod_base = OTHER; note = 2'-O-methyluridine phosphorothioate
  modified_base 120: mod_base = OTHER; note = 2'-O-methylcytidine

SEQ ID NO: 318 - RNA, 120 nt, synthetic construct; identical to SEQ ID NO: 5
  source 1..120: mol_type = other RNA
  modified_base 1: mod_base = OTHER; note = 2'-O-methylguanosine phosphorothioate
  modified_base 2: mod_base = OTHER; note = 2'-O-methyluridine phosphorothioate
  modified_base 3: mod_base = OTHER; note = 2'-O-methyluridine phosphorothioate
  modified_base 5: mod_base = OTHER; note = 2'-O-methyluridine
  modified_base 16: mod_base = OTHER; note = 2'-O-methylcytidine
  modified_base 21: mod_base = OTHER; note = 2'-O-methylcytidine
  modified_base 25: mod_base = OTHER; note = 2'-O-methylcytidine
  modified_base 26: mod_base = OTHER; note = 2'-O-methylguanosine
  modified_base 29: mod_base = OTHER; note = 2'-O-methyluridine
  modified_base 30: mod_base = OTHER; note = 2'-O-methyladenosine
  modified_base 44: mod_base = OTHER; note = 2'-O-methylcytidine
  modified_base 45: mod_base = OTHER; note = 2'-O-methyladenosine
  modified_base 49: mod_base = OTHER; note = 2'-O-methyluridine
  modified_base 50: mod_base = OTHER; note = 2'-O-methylguanosine
  modified_base 62: mod_base = OTHER; note = 2'-O-methyluridine
  modified_base 63: mod_base = OTHER; note = 2'-O-methyladenosine
  modified_base 67: mod_base = OTHER; note = 2'-O-methylcytidine
  modified_base 68: mod_base = OTHER; note = 2'-O-methyluridine
  modified_base 69: mod_base = OTHER; note = 2'-O-methylguanosine
  modified_base 72: mod_base = OTHER; note = 2'-O-methylcytidine
  modified_base 75: mod_base = OTHER; note = 2'-O-methyluridine
  modified_base 76: mod_base = OTHER; note = 2'-O-methylguanosine
  modified_base 79: mod_base = OTHER; note = 2'-O-methyluridine
  modified_base 82: mod_base = OTHER; note = 2'-O-methyluridine
  modified_base 83: mod_base = OTHER; note = 2'-O-methyladenosine
  modified_base 84: mod_base = OTHER; note = 2'-O-methylcytidine
  modified_base 117: mod_base = OTHER; note = 2'-O-methyladenosine
  modified_base 118: mod_base = OTHER; note = 2'-O-methyluridine phosphorothioate
  modified_base 119: mod_base = OTHER; note = 2'-O-methyluridine phosphorothioate
  modified_base 120: mod_base = OTHER; note = 2'-O-methylcytidine

SEQ ID NO: 319 - RNA, 120 nt, synthetic construct; identical to SEQ ID NO: 5
  source 1..120: mol_type = other RNA
  modified_base 1: mod_base = OTHER; note = 2'-O-methylguanosine phosphorothioate
  modified_base 2: mod_base = OTHER; note = 2'-O-methyluridine phosphorothioate
  modified_base 3: mod_base = OTHER; note = 2'-O-methyluridine phosphorothioate
  modified_base 5: mod_base = OTHER; note = 2'-O-methyluridine
  modified_base 16: mod_base = OTHER; note = 2'-O-methylcytidine
  modified_base 21: mod_base = OTHER; note = 2'-O-methylcytidine
  modified_base 25: mod_base = OTHER; note = 2'-O-methylcytidine
  modified_base 26: mod_base = OTHER; note = 2'-O-methylguanosine
  modified_base 29: mod_base = OTHER; note = 2'-O-methyluridine
  modified_base 30: mod_base = OTHER; note = 2'-O-methyladenosine
  modified_base 33: mod_base = OTHER; note = 2'-O-methyluridine
  modified_base 35: mod_base = OTHER; note = 2'-O-methyluridine
  modified_base 37: mod_base = OTHER; note = 2'-O-methyladenosine
  modified_base 39: mod_base = OTHER; note = 2'-O-methyluridine
  modified_base 44: mod_base = OTHER; note = 2'-O-methylcytidine
  modified_base 45: mod_base = OTHER; note = 2'-O-methyladenosine
  modified_base 47: mod_base = OTHER; note = 2'-O-methylguanosine
  modified_base 49: mod_base = OTHER; note = 2'-O-methyluridine
  modified_base 50: mod_base = OTHER; note = 2'-O-methylguanosine
  modified_base 51: mod_base = OTHER; note = 2'-O-methyluridine
  modified_base 62: mod_base = OTHER; note = 2'-O-methyluridine
  modified_base 63: mod_base = OTHER; note = 2'-O-methyladenosine
  modified_base 65: mod_base = OTHER; note = 2'-O-methyluridine
  modified_base 67: mod_base = OTHER; note = 2'-O-methylcytidine
  modified_base 68: mod_base = OTHER; note = 2'-O-methyluridine
  modified_base 69: mod_base = OTHER; note = 2'-O-methylguanosine
  modified_base 72: mod_base = OTHER; note = 2'-O-methylcytidine
  modified_base 75: mod_base = OTHER; note = 2'-O-methyluridine
  modified_base 76: mod_base = OTHER; note = 2'-O-methylguanosine
  modified_base 79: mod_base = OTHER; note = 2'-O-methyluridine
  modified_base 82: mod_base = OTHER; note = 2'-O-methyluridine
  modified_base 83: mod_base = OTHER; note = 2'-O-methyladenosine
  modified_base 84: mod_base = OTHER; note = 2'-O-methylcytidine
  modified_base 86: mod_base = OTHER; note = 2'-O-methyladenosine
  modified_base 87: mod_base = OTHER; note = 2'-O-methylguanosine
  modified_base 89: mod_base = OTHER; note = 2'-O-methylcytidine
  modified_base 92: mod_base = OTHER; note = 2'-O-methyluridine
  modified_base 95: mod_base = OTHER; note = 2'-O-methylcytidine
  modified_base 117: mod_base = OTHER; note = 2'-O-methyladenosine
  modified_base 118: mod_base = OTHER; note = 2'-O-methyluridine phosphorothioate
  modified_base 119: mod_base = OTHER; note = 2'-O-methyluridine phosphorothioate
  modified_base 120: mod_base = OTHER; note = 2'-O-methylcytidine

SEQ ID NO: 320 - RNA, 120 nt, synthetic construct; identical to SEQ ID NO: 5
  source 1..120: mol_type = other RNA
  modified_base 1: mod_base = OTHER; note = 2'-O-methylguanosine phosphorothioate
  modified_base 2: mod_base = OTHER; note = 2'-O-methyluridine phosphorothioate
  modified_base 3: mod_base = OTHER; note = 2'-O-methyluridine phosphorothioate
  modified_base 4: mod_base = OTHER; note = 2'-O-methylcytidine
  modified_base 5: mod_base = OTHER; note = 2'-O-methyluridine
  modified_base 6: mod_base = OTHER; note = 2'-O-methylguanosine
  modified_base 7: mod_base = OTHER; note = 2'-O-methyluridine
  modified_base 11: mod_base = OTHER; note = 2'-O-methyluridine
  modified_base 16: mod_base = OTHER; note = 2'-O-methylcytidine
  modified_base 17: mod_base = OTHER; note = 2'-O-methyladenosine
  modified_base 18: mod_base = OTHER; note = 2'-O-methylguanosine
  modified_base 19: mod_base = OTHER; note = 2'-O-methylguanosine
  modified_base 20: mod_base = OTHER; note = 2'-O-methyladenosine
  modified_base 21: mod_base = OTHER; note = 2'-O-methylcytidine
  modified_base 25: mod_base = OTHER; note = 2'-O-methylcytidine
  modified_base 26: mod_base = OTHER; note = 2'-O-methylguanosine
  modified_base 27: mod_base = OTHER; note = 2'-O-methyluridine
  modified_base 28: mod_base = OTHER; note = 2'-O-methylcytidine
  modified_base 29: mod_base = OTHER; note = 2'-O-methyluridine
  modified_base 30: mod_base = OTHER; note = 2'-O-methyladenosine
  modified_base 31: mod_base = OTHER; note = 2'-O-methylguanosine
  modified_base 39: mod_base = OTHER; note = 2'-O-methyluridine
  modified_base 42: mod_base = OTHER; note = 2'-O-methyluridine
  modified_base 45: mod_base = OTHER; note = 2'-O-methyladenosine
  modified_base 46: mod_base = OTHER; note = 2'-O-methylguanosine
  modified_base 47: mod_base = OTHER; note = 2'-O-methylguanosine
  modified_base 48: mod_base = OTHER; note = 2'-O-methylguanosine
  modified_base 49: mod_base = OTHER; note = 2'-O-methyluridine
  modified_base 50: mod_base = OTHER; note = 2'-O-methylguanosine
  modified_base 51: mod_base = OTHER; note = 2'-O-methyluridine
  modified_base 52: mod_base = OTHER; note = 2'-O-methylguanosine
  modified_base 57: mod_base = OTHER; note = 2'-O-methyladenosine
  modified_base 58: mod_base = OTHER; note = 2'-O-methylcytidine
  modified_base 59: mod_base = OTHER; note = 2'-O-methyluridine
  modified_base 60: mod_base = OTHER; note = 2'-O-methylcytidine
  modified_base 61: mod_base = OTHER; note = 2'-O-methylcytidine
  modified_base 62: mod_base = OTHER; note = 2'-O-methyluridine
  modified_base 64: mod_base = OTHER; note = 2'-O-methyluridine
  modified_base 65: mod_base = OTHER; note = 2'-O-methyluridine
  modified_base 70: mod_base = OTHER; note = 2'-O-methylguanosine
  modified_base 71: mod_base = OTHER; note = 2'-O-methyladenosine
  modified_base 72: mod_base = OTHER; note = 2'-O-methylcytidine
  modified_base 73: mod_base = OTHER; note = 2'-O-methylguanosine
  modified_base 74: mod_base = OTHER; note = 2'-O-methyladenosine
  modified_base 75: mod_base = OTHER; note = 2'-O-methyluridine
  modified_base 76: mod_base = OTHER; note = 2'-O-methylguanosine
  modified_base 77: mod_base = OTHER; note = 2'-O-methyluridine
  modified_base 78: mod_base = OTHER; note = 2'-O-methylcytidine
  modified_base 79: mod_base = OTHER; note = 2'-O-methyluridine
  modified_base 80: mod_base = OTHER; note = 2'-O-methylcytidine
  modified_base 81: mod_base = OTHER; note = 2'-O-methyluridine
  modified_base 82: mod_base = OTHER; note = 2'-O-methyluridine
  modified_base 83: mod_base = OTHER; note = 2'-O-methyladenosine
  modified_base 84: mod_base = OTHER; note = 2'-O-methylcytidine
  modified_base 85: mod_base = OTHER; note = 2'-O-methylguanosine
  modified_base 86: mod_base = OTHER; note = 2'-O-methyladenosine
  modified_base 87: mod_base = OTHER; note = 2'-O-methylguanosine
  modified_base 117: mod_base = OTHER; note = 2'-O-methyladenosine
  modified_base 118: mod_base = OTHER; note = 2'-O-methyluridine phosphorothioate
  modified_base 119: mod_base = OTHER; note = 2'-O-methyluridine phosphorothioate
  modified_base 120: mod_base = OTHER; note = 2'-O-methylcytidine

SEQ ID NO: 321 - RNA, 120 nt, synthetic construct; identical to SEQ ID NO: 5
  source 1..120: mol_type = other RNA
  modified_base 1: mod_base = OTHER; note = 2'-O-methylguanosine phosphorothioate
  modified_base 2: mod_base = OTHER; note = 2'-O-methyluridine phosphorothioate
  modified_base 3: mod_base = OTHER; note = 2'-O-methyluridine phosphorothioate
  modified_base 4: mod_base = OTHER; note = 2'-O-methylcytidine
  modified_base 5: mod_base = OTHER; note = 2'-O-methyluridine
  modified_base 6: mod_base = OTHER; note = 2'-O-methylguanosine
  modified_base 7: mod_base = OTHER; note = 2'-O-methyluridine
  modified_base 11: mod_base = OTHER; note = 2'-O-methyluridine
  modified_base 16: mod_base = OTHER; note = 2'-O-methylcytidine
  modified_base 17: mod_base = OTHER; note = 2'-O-methyladenosine
  modified_base 18: mod_base = OTHER; note = 2'-O-methylguanosine
  modified_base 19: mod_base = OTHER; note = 2'-O-methylguanosine
  modified_base 20: mod_base = OTHER; note = 2'-O-methyladenosine
  modified_base 21: mod_base = OTHER; note = 2'-O-methylcytidine
  modified_base 25: mod_base = OTHER; note = 2'-O-methylcytidine
  modified_base 26: mod_base = OTHER; note = 2'-O-methylguanosine
  modified_base 27: mod_base = OTHER; note = 2'-O-methyluridine
  modified_base 28: mod_base = OTHER; note = 2'-O-methylcytidine
  modified_base 29: mod_base = OTHER; note = 2'-O-methyluridine
  modified_base 30: mod_base = OTHER; note = 2'-O-methyladenosine
  modified_base 31: mod_base = OTHER; note = 2'-O-methylguanosine
  modified_base 45: mod_base = OTHER; note = 2'-O-methyladenosine
  modified_base 46: mod_base = OTHER; note = 2'-O-methylguanosine
  modified_base 47: mod_base = OTHER; note = 2'-O-methylguanosine
  modified_base 48: mod_base = OTHER; note = 2'-O-methylguanosine
  modified_base 49: mod_base = OTHER; note = 2'-O-methyluridine
  modified_base 50: mod_base = OTHER; note = 2'-O-methylguanosine
  modified_base 51: mod_base = OTHER; note = 2'-O-methyluridine
  modified_base 52: mod_base = OTHER; note = 2'-O-methylguanosine
  modified_base 57: mod_base = OTHER; note = 2'-O-methyladenosine
  modified_base 58: mod_base = OTHER; note = 2'-O-methylcytidine
  modified_base 59: mod_base = OTHER; note = 2'-O-methyluridine
  modified_base 60: mod_base = OTHER; note = 2'-O-methylcytidine
  modified_base 61: mod_base = OTHER; note = 2'-O-methylcytidine
  modified_base 62: mod_base = OTHER; note = 2'-O-methyluridine
  modified_base 64: mod_base = OTHER; note = 2'-O-methyluridine
  modified_base 65: mod_base = OTHER; note = 2'-O-methyluridine
  modified_base 70: mod_base = OTHER; note = 2'-O-methylguanosine
  modified_base 71: mod_base = OTHER; note = 2'-O-methyladenosine
  modified_base 72: mod_base = OTHER; note = 2'-O-methylcytidine
  modified_base 73: mod_base = OTHER; note = 2'-O-methylguanosine
  modified_base 74: mod_base = OTHER; note = 2'-O-methyladenosine
  modified_base 75: mod_base = OTHER; note = 2'-O-methyluridine
  modified_base 76: mod_base = OTHER; note = 2'-O-methylguanosine
  modified_base 77: mod_base = OTHER; note = 2'-O-methyluridine
  modified_base 78: mod_base = OTHER; note = 2'-O-methylcytidine
  modified_base 79: mod_base = OTHER; note = 2'-O-methyluridine
  modified_base 80: mod_base = OTHER; note = 2'-O-methylcytidine
  modified_base 81: mod_base = OTHER; note = 2'-O-methyluridine
  modified_base 82: mod_base = OTHER; note = 2'-O-methyluridine
  modified_base 83: mod_base = OTHER; note = 2'-O-methyladenosine
  modified_base 84: mod_base = OTHER; note = 2'-O-methylcytidine
  modified_base 85: mod_base = OTHER; note = 2'-O-methylguanosine
  modified_base 86: mod_base = OTHER; note = 2'-O-methyladenosine
  modified_base 87: mod_base = OTHER; note = 2'-O-methylguanosine
  modified_base 117: mod_base = OTHER; note = 2'-O-methyladenosine
  modified_base 118: mod_base = OTHER; note = 2'-O-methyluridine phosphorothioate
  modified_base 119: mod_base = OTHER; note = 2'-O-methyluridine phosphorothioate
  modified_base 120: mod_base = OTHER; note = 2'-O-methylcytidine

SEQ ID NO: 322 - RNA, 120 nt, synthetic construct; identical to SEQ ID NO: 5
  source 1..120: mol_type = other RNA
  modified_base 1: mod_base = OTHER; note = 2'-O-methylguanosine phosphorothioate
  modified_base 2: mod_base = OTHER; note = 2'-O-methyluridine phosphorothioate
  modified_base 3: mod_base = OTHER; note = 2'-O-methyluridine phosphorothioate
  modified_base 25: mod_base = OTHER; note = 2'-O-methylcytidine
  modified_base 26: mod_base = OTHER; note = 2'-O-methylguanosine
  modified_base 27: mod_base = OTHER; note = 2'-O-methyluridine
  modified_base 28: mod_base = OTHER; note = 2'-O-methylcytidine
  modified_base 29: mod_base = OTHER; note = 2'-O-methyluridine
  modified_base 30: mod_base = OTHER; note = 2'-O-methyladenosine
  modified_base 31: mod_base = OTHER; note = 2'-O-methylguanosine
  modified_base 39: mod_base = OTHER; note = 2'-O-methyluridine
  modified_base 42: mod_base = OTHER; note = 2'-O-methyluridine
  modified_base 45: mod_base = OTHER; note = 2'-O-methyladenosine
  modified_base 46: mod_base = OTHER; note = 2'-O-methylguanosine
  modified_base 47: mod_base = OTHER; note = 2'-O-methylguanosine
  modified_base 48: mod_base = OTHER; note = 2'-O-methylguanosine
  modified_base 49: mod_base = OTHER; note = 2'-O-methyluridine
  modified_base 50: mod_base = OTHER; note = 2'-O-methylguanosine
  modified_base 51: mod_base = OTHER; note = 2'-O-methyluridine
  modified_base 52: mod_base = OTHER; note = 2'-O-methylguanosine
  modified_base 57: mod_base = OTHER; note = 2'-O-methyladenosine
  modified_base 58: mod_base = OTHER; note = 2'-O-methylcytidine
  modified_base 59: mod_base = OTHER; note = 2'-O-methyluridine
  modified_base 60: mod_base = OTHER; note = 2'-O-methylcytidine
  modified_base 61: mod_base = OTHER; note = 2'-O-methylcytidine
  modified_base 62: mod_base = OTHER; note = 2'-O-methyluridine
  modified_base 64: mod_base = OTHER; note = 2'-O-methyluridine
  modified_base 65: mod_base = OTHER; note = 2'-O-methyluridine
  modified_base 70: mod_base = OTHER; note = 2'-O-methylguanosine
  modified_base 71: mod_base = OTHER; note = 2'-O-methyladenosine
  modified_base 72: mod_base = OTHER; note = 2'-O-methylcytidine
  modified_base 73: mod_base = OTHER; note = 2'-O-methylguanosine
  modified_base 74: mod_base = OTHER; note = 2'-O-methyladenosine
  modified_base 75: mod_base = OTHER; note = 2'-O-methyluridine
  modified_base 76: mod_base = OTHER; note = 2'-O-methylguanosine
  modified_base 77: mod_base = OTHER; note = 2'-O-methyluridine
  modified_base 78: mod_base = OTHER; note = 2'-O-methylcytidine
  modified_base 79: mod_base = OTHER; note = 2'-O-methyluridine
  modified_base 80: mod_base = OTHER; note = 2'-O-methylcytidine
  modified_base 81: mod_base = OTHER; note = 2'-O-methyluridine
  modified_base 82: mod_base = OTHER; note = 2'-O-methyluridine
  modified_base 83: mod_base = OTHER; note = 2'-O-methyladenosine
  modified_base 84: mod_base = OTHER; note = 2'-O-methylcytidine
  modified_base 85: mod_base = OTHER; note = 2'-O-methylguanosine
  modified_base 86: mod_base = OTHER; note = 2'-O-methyladenosine
  modified_base 87: mod_base = OTHER; note = 2'-O-methylguanosine
  modified_base 117: mod_base = OTHER; note = 2'-O-methyladenosine
  modified_base 118: mod_base = OTHER; note = 2'-O-methyluridine phosphorothioate
  modified_base 119: mod_base = OTHER; note = 2'-O-methyluridine phosphorothioate
  modified_base 120: mod_base = OTHER; note = 2'-O-methylcytidine

SEQ ID NO: 323 - RNA, 120 nt, synthetic construct; identical to SEQ ID NO: 5
  source 1..120: mol_type = other RNA
  modified_base 1: mod_base = OTHER; note = 2'-O-methylguanosine phosphorothioate
  modified_base 2: mod_base = OTHER; note = 2'-O-methyluridine phosphorothioate
  modified_base 3: mod_base = OTHER; note = 2'-O-methyluridine phosphorothioate
  modified_base 4: mod_base = OTHER; note = 2'-O-methylcytidine
  modified_base 5: mod_base = OTHER; note = 2'-O-methyluridine
  modified_base 6: mod_base = OTHER; note = 2'-O-methylguanosine
  modified_base 7: mod_base = OTHER; note = 2'-O-methyluridine
  modified_base 11: mod_base = OTHER; note = 2'-O-methyluridine
  modified_base 16: mod_base = OTHER; note = 2'-O-methylcytidine
  modified_base 17: mod_base = OTHER; note = 2'-O-methyladenosine
  modified_base 18: mod_base = OTHER; note = 2'-O-methylguanosine
  modified_base 19: mod_base = OTHER; note = 2'-O-methylguanosine
  modified_base 20: mod_base = OTHER; note = 2'-O-methyladenosine
  modified_base 21: mod_base = OTHER; note = 2'-O-methylcytidine
  modified_base 25: mod_base = OTHER; note = 2'-O-methylcytidine
  modified_base 26: mod_base = OTHER; note = 2'-O-methylguanosine
  modified_base 27: mod_base = OTHER; note = 2'-O-methyluridine
  modified_base 28: mod_base = OTHER; note = 2'-O-methylcytidine
  modified_base 29: mod_base = OTHER; note = 2'-O-methyluridine
  modified_base 30: mod_base = OTHER; note = 2'-O-methyladenosine
  modified_base 31: mod_base = OTHER; note = 2'-O-methylguanosine
  modified_base 39: mod_base = OTHER; note = 2'-O-methyluridine
  modified_base 42: mod_base = OTHER; note = 2'-O-methyluridine
  modified_base 64: mod_base = OTHER; note = 2'-O-methyluridine
  modified_base 65: mod_base = OTHER; note = 2'-O-methyluridine
  modified_base 70: mod_base = OTHER; note = 2'-O-methylguanosine
  modified_base 71: mod_base = OTHER; note = 2'-O-methyladenosine
  modified_base 72: mod_base = OTHER; note = 2'-O-methylcytidine
  modified_base 73: mod_base = OTHER; note = 2'-O-methylguanosine
  modified_base 74: mod_base = OTHER; note = 2'-O-methyladenosine
  modified_base 75: mod_base = OTHER; note = 2'-O-methyluridine
  modified_base 76: mod_base = OTHER; note = 2'-O-methylguanosine
  modified_base 77: mod_base = OTHER; note = 2'-O-methyluridine
  modified_base 78: mod_base = OTHER; note = 2'-O-methylcytidine
  modified_base 79: mod_base = OTHER; note = 2'-O-methyluridine
  modified_base 80: mod_base = OTHER; note = 2'-O-methylcytidine
  modified_base 81: mod_base = OTHER; note = 2'-O-methyluridine
  modified_base 82: mod_base = OTHER; note = 2'-O-methyluridine
  modified_base 83: mod_base = OTHER; note = 2'-O-methyladenosine
  modified_base 84: mod_base = OTHER; note = 2'-O-methylcytidine
  modified_base 85: mod_base = OTHER; note = 2'-O-methylguanosine
  modified_base 86: mod_base = OTHER; note = 2'-O-methyladenosine
  modified_base 87: mod_base = OTHER; note = 2'-O-methylguanosine
  modified_base 117: mod_base = OTHER; note = 2'-O-methyladenosine
  modified_base 118: mod_base = OTHER; note = 2'-O-methyluridine phosphorothioate
  modified_base 119: mod_base = OTHER; note = 2'-O-methyluridine phosphorothioate
  modified_base 120: mod_base = OTHER; note = 2'-O-methylcytidine

SEQ ID NO: 324 - RNA, 120 nt, synthetic construct; identical to SEQ ID NO: 5
  source 1..120: mol_type = other RNA
  modified_base 1: mod_base = OTHER; note = 2'-O-methylguanosine phosphorothioate
  modified_base 2: mod_base = OTHER; note = 2'-O-methyluridine phosphorothioate
  modified_base 3: mod_base = OTHER; note = 2'-O-methyluridine phosphorothioate
  modified_base 98: mod_base = OTHER; note = 2'-O-methyladenosine
  modified_base 104: mod_base = OTHER; note = 2'-O-methyluridine
  modified_base 105: mod_base = OTHER; note = 2'-O-methylcytidine
  modified_base 109: mod_base = OTHER; note = 2'-O-methylguanosine
  modified_base 110: mod_base = OTHER; note = 2'-O-methylguanosine
  modified_base 117: mod_base = OTHER; note = 2'-O-methyladenosine
  modified_base 118: mod_base = OTHER; note = 2'-O-methyluridine phosphorothioate
  modified_base 119: mod_base = OTHER; note = 2'-O-methyluridine phosphorothioate
  modified_base 120: mod_base = OTHER; note = 2'-O-methylcytidine

SEQ ID NO: 325 - RNA, 120 nt, synthetic construct; identical to SEQ ID NO: 5
  source 1..120: mol_type = other RNA
  modified_base 1: mod_base = OTHER; note = 2'-O-methylguanosine phosphorothioate
  modified_base 2: mod_base = OTHER; note = 2'-O-methyluridine phosphorothioate
  modified_base 3: mod_base = OTHER; note = 2'-O-methyluridine phosphorothioate
  modified_base 4: mod_base = OTHER; note = 2'-O-methylcytidine
  modified_base 5: mod_base = OTHER; note = 2'-O-methyluridine
  modified_base 6: mod_base = OTHER; note = 2'-O-methylguanosine
  modified_base 7: mod_base = OTHER; note = 2'-O-methyluridine
  modified_base 11: mod_base = OTHER; note = 2'-O-methyluridine
  modified_base 16: mod_base = OTHER; note = 2'-O-methylcytidine
  modified_base 17: mod_base = OTHER; note = 2'-O-methyladenosine
  modified_base 18: mod_base = OTHER; note = 2'-O-methylguanosine
  modified_base 19: mod_base = OTHER; note = 2'-O-methylguanosine
  modified_base 20: mod_base = OTHER; note = 2'-O-methyladenosine
  modified_base 21: mod_base = OTHER; note = 2'-O-methylcytidine
  modified_base 25: mod_base = OTHER; note = 2'-O-methylcytidine
  modified_base 26: mod_base = OTHER; note = 2'-O-methylguanosine
  modified_base 27: mod_base = OTHER; note = 2'-O-methyluridine
  modified_base 28: mod_base = OTHER; note = 2'-O-methylcytidine
  modified_base 29: mod_base = OTHER; note = 2'-O-methyluridine
  modified_base 30: mod_base = OTHER; note = 2'-O-methyladenosine
  modified_base 31: mod_base = OTHER; note = 2'-O-methylguanosine
  modified_base 39: mod_base = OTHER; note = 2'-O-methyluridine
  modified_base 42: mod_base = OTHER; note = 2'-O-methyluridine
  modified_base 45: mod_base = OTHER; note = 2'-O-methyladenosine
  modified_base 46: mod_base = OTHER; note = 2'-O-methylguanosine
  modified_base 47: mod_base = OTHER; note = 2'-O-methylguanosine
  modified_base 48: mod_base = OTHER; note = 2'-O-methylguanosine
  modified_base 49: mod_base = OTHER; note = 2'-O-methyluridine
  modified_base 50: mod_base = OTHER; note = 2'-O-methylguanosine
  modified_base 51: mod_base = OTHER; note = 2'-O-methyluridine
  modified_base 52: mod_base = OTHER; note = 2'-O-methylguanosine
  modified_base 57: mod_base = OTHER; note = 2'-O-methyladenosine
  modified_base 58: mod_base = OTHER; note = 2'-O-methylcytidine
  modified_base 59: mod_base = OTHER; note = 2'-O-methyluridine
  modified_base 60: mod_base = OTHER; note = 2'-O-methylcytidine
  modified_base 61: mod_base = OTHER; note = 2'-O-methylcytidine
  modified_base 62: mod_base = OTHER; note = 2'-O-methyluridine
  modified_base 64: mod_base = OTHER; note = 2'-O-methyluridine
  modified_base 65: mod_base = OTHER; note = 2'-O-methyluridine
  modified_base 70: mod_base = OTHER; note = 2'-O-methylguanosine
  modified_base 71: mod_base = OTHER; note = 2'-O-methyladenosine
  modified_base 72: mod_base = OTHER; note = 2'-O-methylcytidine
  modified_base 73: mod_base = OTHER; note = 2'-O-methylguanosine
  modified_base 74: mod_base = OTHER; note = 2'-O-methyladenosine
  modified_base 75: mod_base = OTHER; note = 2'-O-methyluridine
  modified_base 76: mod_base = OTHER; note = 2'-O-methylguanosine
  modified_base 77: mod_base = OTHER; note = 2'-O-methyluridine
  modified_base 78: mod_base = OTHER; note = 2'-O-methylcytidine
  modified_base 79: mod_base = OTHER; note = 2'-O-methyluridine
  modified_base 80: mod_base = OTHER; note = 2'-O-methylcytidine
  modified_base 81: mod_base = OTHER; note = 2'-O-methyluridine
  modified_base 82: mod_base = OTHER; note = 2'-O-methyluridine
  modified_base 83: mod_base = OTHER; note = 2'-O-methyladenosine
  modified_base 84: mod_base = OTHER; note = 2'-O-methylcytidine
  modified_base 85: mod_base = OTHER; note = 2'-O-methylguanosine
  modified_base 86: mod_base = OTHER; note = 2'-O-methyladenosine
  modified_base 87: mod_base = OTHER; note = 2'-O-methylguanosine
  modified_base 98: mod_base = OTHER; note = 2'-O-methyladenosine
  modified_base 104: mod_base = OTHER; note = 2'-O-methyluridine
  modified_base 105: mod_base = OTHER; note = 2'-O-methylcytidine
  modified_base 109: mod_base = OTHER; note = 2'-O-methylguanosine
  modified_base 110: mod_base = OTHER; note = 2'-O-methylguanosine
  modified_base 117: mod_base = OTHER; note = 2'-O-methyladenosine
  modified_base 118: mod_base = OTHER; note = 2'-O-methyluridine phosphorothioate
  modified_base 119: mod_base = OTHER; note = 2'-O-methyluridine phosphorothioate
  modified_base 120: mod_base = OTHER; note = 2'-O-methylcytidine

SEQ ID NO: 326 - RNA, 120 nt, synthetic construct; identical to SEQ ID NO: 5
  source 1..120: mol_type = other RNA
  modified_base 1: mod_base = OTHER; note = 2'-O-methylguanosine phosphorothioate
  modified_base 2: mod_base = OTHER; note = 2'-O-methyluridine phosphorothioate
  modified_base 3: mod_base = OTHER; note = 2'-O-methyluridine phosphorothioate
  modified_base 4: mod_base = OTHER; note = 2'-O-methylcytidine
  modified_base 5: mod_base = OTHER; note = 2'-O-methyluridine
  modified_base 6: mod_base = OTHER; note = 2'-O-methylguanosine
  modified_base 7: mod_base = OTHER; note = 2'-O-methyluridine
  modified_base 11: mod_base = OTHER; note = 2'-O-methyluridine
  modified_base 16: mod_base = OTHER; note = 2'-O-methylcytidine
  modified_base 17: mod_base = OTHER; note = 2'-O-methyladenosine
  modified_base 18: mod_base = OTHER; note = 2'-O-methylguanosine
  modified_base 19: mod_base = OTHER; note = 2'-O-methylguanosine
  modified_base 20: mod_base = OTHER; note = 2'-O-methyladenosine
  modified_base 21: mod_base = OTHER; note = 2'-O-methylcytidine
  modified_base 25: mod_base = OTHER; note = 2'-O-methylcytidine
  modified_base 26: mod_base = OTHER; note = 2'-O-methylguanosine
  modified_base 27: mod_base = OTHER; note = 2'-O-methyluridine
  modified_base 28: mod_base = OTHER; note = 2'-O-methylcytidine
  modified_base 29: mod_base = OTHER; note = 2'-O-methyluridine
  modified_base 30: mod_base = OTHER; note = 2'-O-methyladenosine
  modified_base 31: mod_base = OTHER; note = 2'-O-methylguanosine
  modified_base 39: mod_base = OTHER; note = 2'-O-methyluridine
  modified_base 42: mod_base = OTHER; note = 2'-O-methyluridine
  modified_base 45: mod_base = OTHER; note = 2'-O-methyladenosine
  modified_base 46: mod_base = OTHER; note = 2'-O-methylguanosine
  modified_base 47: mod_base = OTHER; note = 2'-O-methylguanosine
  modified_base 48: mod_base = OTHER; note = 2'-O-methylguanosine
  modified_base 49: mod_base = OTHER; note = 2'-O-methyluridine
  modified_base 50: mod_base = OTHER; note = 2'-O-methylguanosine
  modified_base 51: mod_base = OTHER; note = 2'-O-methyluridine
  modified_base 52: mod_base = OTHER; note = 2'-O-methylguanosine
  modified_base 57: mod_base = OTHER; note = 2'-O-methyladenosine
  modified_base 58: mod_base = OTHER; note = 2'-O-methylcytidine
  modified_base 59: mod_base = OTHER; note = 2'-O-methyluridine
  modified_base 60: mod_base = OTHER; note = 2'-O-methylcytidine
  modified_base 61: mod_base = OTHER; note = 2'-O-methylcytidine
  modified_base 62: mod_base = OTHER; note = 2'-O-methyluridine
  modified_base 64: mod_base = OTHER; note = 2'-O-methyluridine
  modified_base 65: mod_base = OTHER; note = 2'-O-methyluridine
  modified_base 70: mod_base = OTHER; note = 2'-O-methylguanosine
  modified_base 71: mod_base = OTHER; note = 2'-O-methyladenosine
  modified_base 72: mod_base = OTHER; note = 2'-O-methylcytidine
  modified_base 73: mod_base = OTHER; note = 2'-O-methylguanosine
  modified_base 74: mod_base = OTHER; note = 2'-O-methyladenosine
  modified_base 75: mod_base = OTHER; note = 2'-O-methyluridine
  modified_base 76: mod_base = OTHER; note = 2'-O-methylguanosine
  modified_base 77: mod_base = OTHER; note = 2'-O-methyluridine
  modified_base 78: mod_base = OTHER; note = 2'-O-methylcytidine
  modified_base 79: mod_base = OTHER; note = 2'-O-methyluridine
  modified_base 80: mod_base = OTHER; note = 2'-O-methylcytidine
  modified_base 81: mod_base = OTHER; note = 2'-O-methyluridine
  modified_base 82: mod_base = OTHER; note = 2'-O-methyluridine
  modified_base 83: mod_base = OTHER; note = 2'-O-methyladenosine
  modified_base 84: mod_base = OTHER; note = 2'-O-methylcytidine
  modified_base 85: mod_base = OTHER; note = 2'-O-methylguanosine
  modified_base 86: mod_base = OTHER; note = 2'-O-methyladenosine
  modified_base 87: mod_base = OTHER; note = 2'-O-methylguanosine
  modified_base 98: mod_base = OTHER; note = 2'-O-methyladenosine
  modified_base 101: mod_base = OTHER; note = 2'-O-methyluridine
  modified_base 104: mod_base = OTHER; note = 2'-O-methyluridine
  modified_base 105: mod_base = OTHER; note = 2'-O-methylcytidine
  modified_base 108: mod_base = OTHER; note = 2'-O-methyluridine
  modified_base 109: mod_base = OTHER; note = 2'-O-methylguanosine
  modified_base 110: mod_base = OTHER; note = 2'-O-methylguanosine
  modified_base 115: mod_base = OTHER; note = 2'-O-methyluridine
  modified_base 117: mod_base = OTHER; note = 2'-O-methyladenosine
  modified_base 118: mod_base = OTHER; note = 2'-O-methyluridine phosphorothioate
  modified_base 119: mod_base = OTHER; note = 2'-O-methyluridine phosphorothioate
  modified_base 120: mod_base = OTHER; note = 2'-O-methylcytidine

SEQ ID NO: 327 - RNA, 120 nt, synthetic construct; identical to SEQ ID NO: 5
  source 1..120: mol_type = other RNA
  modified_base 1: mod_base = OTHER; note = 2'-O-methylguanosine phosphorothioate
  modified_base 2: mod_base = OTHER; note = 2'-O-methyluridine phosphorothioate
  modified_base 3: mod_base = OTHER; note = 2'-O-methyluridine phosphorothioate
  modified_base 4: mod_base = OTHER; note = 2'-O-methylcytidine
  modified_base 5: mod_base = OTHER; note = 2'-O-methyluridine
  modified_base 6: mod_base = OTHER; note = 2'-O-methylguanosine
  modified_base 7: mod_base = OTHER; note = 2'-O-methyluridine
  modified_base 11: mod_base = OTHER; note = 2'-O-methyluridine
  modified_base 16: mod_base = OTHER; note = 2'-O-methylcytidine
  modified_base 17: mod_base = OTHER; note = 2'-O-methyladenosine
  modified_base 18: mod_base = OTHER; note = 2'-O-methylguanosine
  modified_base 19: mod_base = OTHER; note = 2'-O-methylguanosine
  modified_base 20: mod_base = OTHER; note = 2'-O-methyladenosine
  modified_base 21: mod_base = OTHER; note = 2'-O-methylcytidine
  modified_base 25: mod_base = OTHER; note = 2'-O-methylcytidine
  modified_base 26: mod_base = OTHER; note = 2'-O-methylguanosine
  modified_base 27: mod_base = OTHER; note = 2'-O-methyluridine
  modified_base 28: mod_base = OTHER; note = 2'-O-methylcytidine
  modified_base 29: mod_base = OTHER; note = 2'-O-methyluridine
  modified_base 30: mod_base = OTHER; note = 2'-O-methyladenosine
  modified_base 31: mod_base = OTHER; note = 2'-O-methylguanosine
  modified_base 33: mod_base = OTHER; note = 2'-O-methyluridine
  modified_base 39: mod_base = OTHER; note = 2'-O-methyluridine
  modified_base 42: mod_base = OTHER; note = 2'-O-methyluridine
  modified_base 45: mod_base = OTHER; note = 2'-O-methyladenosine
  modified_base 46: mod_base = OTHER; note = 2'-O-methylguanosine
  modified_base 47: mod_base = OTHER; note = 2'-O-methylguanosine
  modified_base 48: mod_base = OTHER; note = 2'-O-methylguanosine
  modified_base 49: mod_base = OTHER; note = 2'-O-methyluridine
  modified_base 50: mod_base = OTHER; note = 2'-O-methylguanosine
  modified_base 51: mod_base = OTHER; note = 2'-O-methyluridine
  modified_base 52: mod_base = OTHER; note = 2'-O-methylguanosine
  modified_base 57: mod_base = OTHER; note = 2'-O-methyladenosine
  modified_base 58: mod_base = OTHER; note = 2'-O-methylcytidine
  modified_base 59: mod_base = OTHER; note = 2'-O-methyluridine
  modified_base 60: mod_base = OTHER; note = 2'-O-methylcytidine
  modified_base 61: mod_base = OTHER; note = 2'-O-methylcytidine
  modified_base 62: mod_base = OTHER; note = 2'-O-methyluridine
  modified_base 64: mod_base = OTHER; note = 2'-O-methyluridine
  modified_base 65: mod_base = OTHER; note = 2'-O-methyluridine
  modified_base 70: mod_base = OTHER; note = 2'-O-methylguanosine
  modified_base 71: mod_base = OTHER; note = 2'-O-methyladenosine
  modified_base 72: mod_base = OTHER; note = 2'-O-methylcytidine
  modified_base 73: mod_base = OTHER; note = 2'-O-methylguanosine
  modified_base 74: mod_base = OTHER; note = 2'-O-methyladenosine
  modified_base 75: mod_base = OTHER; note = 2'-O-methyluridine
  modified_base 76: mod_base = OTHER; note = 2'-O-methylguanosine
  modified_base 77: mod_base = OTHER; note = 2'-O-methyluridine
  modified_base 78: mod_base = OTHER; note = 2'-O-methylcytidine
  modified_base 79: mod_base = OTHER; note = 2'-O-methyluridine
  modified_base 80: mod_base = OTHER; note = 2'-O-methylcytidine
  modified_base 81: mod_base = OTHER; note = 2'-O-methyluridine
  modified_base 82: mod_base = OTHER; note = 2'-O-methyluridine
  modified_base 83: mod_base = OTHER; note = 2'-O-methyladenosine
  modified_base 84: mod_base = OTHER; note = 2'-O-methylcytidine
  modified_base 85: mod_base = OTHER; note = 2'-O-methylguanosine
  modified_base 86: mod_base = OTHER; note = 2'-O-methyladenosine
  modified_base 87: mod_base = OTHER; note = 2'-O-methylguanosine
  modified_base 89: mod_base = OTHER; note = 2'-O-methylcytidine
  modified_base 98: mod_base = OTHER; note = 2'-O-methyladenosine
  modified_base 101: mod_base = OTHER; note = 2'-O-methyluridine
  modified_base 104: mod_base = OTHER; note = 2'-O-methyluridine
  modified_base 105: mod_base = OTHER; note = 2'-O-methylcytidine
  modified_base 108: mod_base = OTHER; note = 2'-O-methyluridine
  modified_base 109: mod_base = OTHER; note = 2'-O-methylguanosine
  modified_base 110: mod_base = OTHER; note = 2'-O-methylguanosine
  modified_base 115: mod_base = OTHER; note = 2'-O-methyluridine
  modified_base 117: mod_base = OTHER; note = 2'-O-methyladenosine
  modified_base 118: mod_base = OTHER; note = 2'-O-methyluridine phosphorothioate
  modified_base 119: mod_base = OTHER; note = 2'-O-methyluridine phosphorothioate
  modified_base 120: mod_base = OTHER; note = 2'-O-methylcytidine

SEQ ID NO: 328 - RNA, 124 nt, synthetic construct; identical to SEQ ID NO: 7
  source 1..124: mol_type = other RNA
  modified_base 1: mod_base = OTHER; note = 2'-O-methylguanosine phosphorothioate
  modified_base 2: mod_base = OTHER; note = 2'-O-methyluridine phosphorothioate
  modified_base 3: mod_base = OTHER; note = 2'-O-methyluridine phosphorothioate
  modified_base 4: mod_base = OTHER; note = 2'-O-methylcytidine
  modified_base 5: mod_base = OTHER; note = 2'-O-methyluridine
  modified_base 6: mod_base = OTHER; note = 2'-O-methylguanosine
  modified_base 7: mod_base = OTHER; note = 2'-O-methyluridine
  modified_base 11: mod_base = OTHER; note = 2'-O-methyluridine
  modified_base 16: mod_base = OTHER; note = 2'-O-methylcytidine
  modified_base 17: mod_base = OTHER; note = 2'-O-methyladenosine
  modified_base 18: mod_base = OTHER; note = 2'-O-methylguanosine
  modified_base 19: mod_base = OTHER; note = 2'-O-methylguanosine
  modified_base 20: mod_base = OTHER; note = 2'-O-methyladenosine
  modified_base 21: mod_base = OTHER; note = 2'-O-methylcytidine
  modified_base 25: mod_base = OTHER; note = 2'-O-methylcytidine
  modified_base 26: mod_base = OTHER; note = 2'-O-methylguanosine
  modified_base 27: mod_base = OTHER; note = 2'-O-methyluridine
  modified_base 28: mod_base = OTHER; note = 2'-O-methylcytidine
  modified_base 29: mod_base = OTHER; note = 2'-O-methyluridine
  modified_base 30: mod_base = OTHER; note = 2'-O-methyladenosine
  modified_base 31: mod_base = OTHER; note = 2'-O-methylguanosine
  modified_base 39: mod_base = OTHER; note = 2'-O-methyluridine
  modified_base 42: mod_base = OTHER; note = 2'-O-methyluridine
  modified_base 45: mod_base = OTHER; note = 2'-O-methyladenosine
  modified_base 46: mod_base = OTHER; note = 2'-O-methylguanosine
  modified_base 47: mod_base = OTHER; note = 2'-O-methylguanosine
  modified_base 48: mod_base = OTHER; note = 2'-O-methylguanosine
  modified_base 49: mod_base = OTHER; note = 2'-O-methyluridine
  modified_base 50: mod_base = OTHER; note = 2'-O-methylguanosine
  modified_base 51: mod_base = OTHER; note = 2'-O-methyluridine
  modified_base 52: mod_base = OTHER; note = 2'-O-methylguanosine
  modified_base 57: mod_base = OTHER; note = 2'-O-methyladenosine
  modified_base 58: mod_base = OTHER; note = 2'-O-methylcytidine
  modified_base 59: mod_base = OTHER; note = 2'-O-methyluridine
  modified_base 60: mod_base = OTHER; note = 2'-O-methylcytidine
  modified_base 61: mod_base = OTHER; note = 2'-O-methylcytidine
  modified_base 62: mod_base = OTHER; note = 2'-O-methyluridine
  modified_base 64: mod_base = OTHER; note = 2'-O-methyluridine
  modified_base 65: mod_base = OTHER; note = 2'-O-methyluridine
  modified_base 70: mod_base = OTHER; note = 2'-O-methylguanosine
  modified_base 71: mod_base = OTHER; note = 2'-O-methyladenosine
  modified_base 72: mod_base = OTHER; note = 2'-O-methylcytidine
  modified_base 73: mod_base = OTHER; note = 2'-O-methylguanosine
  modified_base 74: mod_base = OTHER; note = 2'-O-methyladenosine
  modified_base 75: mod_base = OTHER; note = 2'-O-methyluridine
  modified_base 76: mod_base = OTHER; note = 2'-O-methylguanosine
  modified_base 77: mod_base = OTHER; note = 2'-O-methyluridine
  modified_base 78: mod_base = OTHER; note = 2'-O-methylcytidine
  modified_base 79: mod_base = OTHER; note = 2'-O-methyluridine
  modified_base 80: mod_base = OTHER; note = 2'-O-methylcytidine
  modified_base 81: mod_base = OTHER; note = 2'-O-methyluridine
  modified_base 82: mod_base = OTHER; note = 2'-O-methyluridine
  modified_base 83: mod_base = OTHER; note = 2'-O-methyladenosine
  modified_base 84: mod_base = OTHER; note = 2'-O-methylcytidine
  modified_base 85: mod_base = OTHER; note = 2'-O-methylguanosine
  modified_base 86: mod_base = OTHER; note = 2'-O-methyladenosine
  modified_base 87: mod_base = OTHER; note = 2'-O-methylguanosine
  modified_base 98: mod_base = OTHER; note = 2'-O-methyladenosine
  modified_base 104: mod_base = OTHER; note = 2'-O-methyluridine
  modified_base 105: mod_base = OTHER; note = 2'-O-methylcytidine
  modified_base 109: mod_base = OTHER; note = 2'-O-methylguanosine
  modified_base 110: mod_base = OTHER; note = 2'-O-methylguanosine
  modified_base 117: mod_base = OTHER; note = 2'-O-methyladenosine
  modified_base 118: mod_base = OTHER; note = 2'-O-methyluridine
  modified_base 119: mod_base = OTHER; note = 2'-O-methyluridine
  modified_base 120: mod_base = OTHER; note = 2'-O-methylcytidine
  modified_base 121: mod_base = OTHER; note = 2'-O-methyluridine
  modified_base 122: mod_base = OTHER; note = 2'-O-methyluridine phosphorothioate
  modified_base 123: mod_base = OTHER; note = 2'-O-methyluridine phosphorothioate
  modified_base 124: mod_base = OTHER; note = 2'-O-methyluridine

SEQ ID NO: 329 - RNA, 124 nt, synthetic construct; identical to SEQ ID NO: 1
  source 1..124: mol_type = other RNA
  modified_base 1: mod_base = OTHER; note = 2'-O-methylguanosine phosphorothioate
  modified_base 2: mod_base = OTHER; note = 2'-O-methyluridine phosphorothioate
  modified_base 121: mod_base = OTHER; note = 2'-O-methyluridine
  modified_base 122: mod_base = OTHER; note = 2'-O-methyluridine phosphorothioate
  modified_base 123: mod_base = OTHER; note = 2'-O-methyluridine phosphorothioate
  modified_base 124: mod_base = OTHER; note = 2'-O-methyluridine

SEQ ID NO: 330 - RNA, 124 nt, synthetic construct; identical to SEQ ID NO: 1
  source 1..124: mol_type = other RNA
  modified_base 1: mod_base = OTHER; note = 2'-O-methylguanosine phosphorothioate
  modified_base 2: mod_base = OTHER; note = 2'-O-methyluridine phosphorothioate
  modified_base 4: mod_base = OTHER; note = 2'-O-methylcytidine
  modified_base 5: mod_base = OTHER; note = 2'-O-methyluridine
  modified_base 6: mod_base = OTHER; note = 2'-O-methylguanosine
  modified_base 7: mod_base = OTHER; note = 2'-O-methyluridine
  modified_base 11: mod_base = OTHER; note = 2'-O-methyluridine
  modified_base 16: mod_base = OTHER; note = 2'-O-methylcytidine
  modified_base 17: mod_base = OTHER; note = 2'-O-methyladenosine
  modified_base 18: mod_base = OTHER; note = 2'-O-methylguanosine
  modified_base 19: mod_base = OTHER; note = 2'-O-methylguanosine
  modified_base 20: mod_base = OTHER; note = 2'-O-methyladenosine
  modified_base 21: mod_base = OTHER; note = 2'-O-methylcytidine
  modified_base 25: mod_base = OTHER; note = 2'-O-methylcytidine
  modified_base 26: mod_base = OTHER; note = 2'-O-methylguanosine
  modified_base 27: mod_base = OTHER; note = 2'-O-methyluridine
  modified_base 28: mod_base = OTHER; note = 2'-O-methylcytidine
  modified_base 29: mod_base = OTHER; note = 2'-O-methyluridine
  modified_base 30: mod_base = OTHER; note = 2'-O-methyladenosine
  modified_base 31: mod_base = OTHER; note = 2'-O-methylguanosine
  modified_base 39: mod_base = OTHER; note = 2'-O-methyluridine
  modified_base 42: mod_base = OTHER; note = 2'-O-methyluridine
  modified_base 45: mod_base = OTHER; note = 2'-O-methyladenosine
  modified_base 46: mod_base = OTHER; note = 2'-O-methylguanosine
  modified_base 47: mod_base = OTHER; note = 2'-O-methylguanosine
  modified_base 48: mod_base = OTHER; note = 2'-O-methylguanosine
  modified_base 49: mod_base = OTHER; note = 2'-O-methyluridine
  modified_base 50: mod_base = OTHER; note = 2'-O-methylguanosine
  modified_base 51: mod_base = OTHER; note = 2'-O-methyluridine
  modified_base 52: mod_base = OTHER; note = 2'-O-methylguanosine
  modified_base 57: mod_base = OTHER; note = 2'-O-methyladenosine
  modified_base 58: mod_base = OTHER; note = 2'-O-methylcytidine
  modified_base 59: mod_base = OTHER; note = 2'-O-methyluridine
  modified_base 60: mod_base = OTHER; note = 2'-O-methylcytidine
  modified_base 61: mod_base = OTHER; note = 2'-O-methylcytidine
  modified_base 62: mod_base = OTHER; note = 2'-O-methyluridine
  modified_base 64: mod_base = OTHER; note = 2'-O-methyluridine
  modified_base 65: mod_base = OTHER; note = 2'-O-methyluridine
  modified_base 70: mod_base = OTHER; note = 2'-O-methylguanosine
  modified_base 71: mod_base = OTHER; note = 2'-O-methyladenosine
  modified_base 72: mod_base = OTHER; note = 2'-O-methylcytidine
  modified_base 73: mod_base = OTHER; note = 2'-O-methylguanosine
  modified_base 74: mod_base = OTHER; note = 2'-O-methyladenosine
  modified_base 75: mod_base = OTHER; note = 2'-O-methyluridine
  modified_base 76: mod_base = OTHER; note = 2'-O-methylguanosine
  modified_base 77: mod_base = OTHER; note = 2'-O-methyluridine
  modified_base 78: mod_base = OTHER; note = 2'-O-methylcytidine
  modified_base 79: mod_base = OTHER; note = 2'-O-methyluridine
  modified_base 80: mod_base = OTHER; note = 2'-O-methylcytidine
  modified_base 81: mod_base = OTHER; note = 2'-O-methyluridine
  modified_base 82: mod_base = OTHER; note = 2'-O-methyluridine
  modified_base 83: mod_base = OTHER; note = 2'-O-methyladenosine
  modified_base 84: mod_base = OTHER; note = 2'-O-methylcytidine
  modified_base 85: mod_base = OTHER; note = 2'-O-methylguanosine
  modified_base 86: mod_base = OTHER; note = 2'-O-methyladenosine
  modified_base 87: mod_base = OTHER; note = 2'-O-methylguanosine
  modified_base 117: mod_base = OTHER; note = 2'-O-methyluridine
  modified_base 121: mod_base = OTHER; note = 2'-O-methyluridine
  modified_base 122: mod_base = OTHER; note = 2'-O-methyluridine phosphorothioate
  modified_base 123: mod_base = OTHER; note = 2'-O-methyluridine phosphorothioate
  modified_base 124: mod_base = OTHER; note = 2'-O-methyluridine

SEQ ID NO: 331 - RNA, 124 nt, synthetic construct; identical to SEQ ID NO: 1
  source 1..124: mol_type = other RNA
  modified_base 1: mod_base = OTHER; note = 2'-O-methylguanosine phosphorothioate
  modified_base 2: mod_base = OTHER; note = 2'-O-methyluridine phosphorothioate
  modified_base 98: mod_base = OTHER; note = 2'-O-methyladenosine
  modified_base 104: mod_base = OTHER; note = 2'-O-methylcytidine
  modified_base 105: mod_base = OTHER; note = 2'-O-methyladenosine
  modified_base 109: mod_base = OTHER; note = 2'-O-methyluridine
  modified_base 110: mod_base = OTHER; note = 2'-O-methyladenosine
  modified_base 117: mod_base = OTHER; note = 2'-O-methyluridine
  modified_base 118: mod_base = OTHER; note = 2'-O-methyladenosine
  modified_base 119: mod_base = OTHER; note = 2'-O-methyladenosine
  modified_base 120: mod_base = OTHER; note = 2'-O-methyladenosine
  modified_base 121: mod_base = OTHER; note = 2'-O-methyluridine
  modified_base 122: mod_base = OTHER; note = 2'-O-methyluridine phosphorothioate
  modified_base 123: mod_base = OTHER; note = 2'-O-methyluridine phosphorothioate
  modified_base 124: mod_base = OTHER; note = 2'-O-methyluridine

SEQ ID NO: 332 - RNA, 124 nt, synthetic construct; identical to SEQ ID NO: 1
  source 1..124: mol_type = other RNA
  modified_base 1: mod_base = OTHER; note = 2'-O-methylguanosine phosphorothioate
  modified_base 2: mod_base = OTHER; note = 2'-O-methyluridine phosphorothioate
  modified_base 4: mod_base = OTHER; note = 2'-O-methylcytidine
  modified_base 5: mod_base = OTHER; note = 2'-O-methyluridine
  modified_base 6: mod_base = OTHER; note = 2'-O-methylguanosine
  modified_base 7: mod_base = OTHER; note = 2'-O-methyluridine
  modified_base 11: mod_base = OTHER; note = 2'-O-methyluridine
  modified_base 16: mod_base = OTHER; note = 2'-O-methylcytidine
  modified_base 17: mod_base = OTHER; note = 2'-O-methyladenosine
  modified_base 18: mod_base = OTHER; note = 2'-O-methylguanosine
  modified_base 19: mod_base = OTHER; note = 2'-O-methylguanosine
  modified_base 20: mod_base = OTHER; note = 2'-O-methyladenosine
  modified_base 21: mod_base = OTHER; note = 2'-O-methylcytidine
  modified_base 25: mod_base = OTHER; note = 2'-O-methylcytidine
  modified_base 26: mod_base = OTHER; note = 2'-O-methylguanosine
  modified_base 27: mod_base = OTHER; note = 2'-O-methyluridine
  modified_base 28: mod_base = OTHER; note = 2'-O-methylcytidine
  modified_base 29: mod_base = OTHER; note = 2'-O-methyluridine
  modified_base 30: mod_base = OTHER; note = 2'-O-methyladenosine
  modified_base 31: mod_base = OTHER; note = 2'-O-methylguanosine
  modified_base 39: mod_base = OTHER; note = 2'-O-methyluridine
  modified_base 42: mod_base = OTHER; note = 2'-O-methyluridine
  modified_base 45: mod_base = OTHER; note = 2'-O-methyladenosine
  modified_base 46: mod_base = OTHER; note = 2'-O-methylguanosine
  modified_base 47: mod_base = OTHER; note = 2'-O-methylguanosine
  modified_base 48: mod_base = OTHER; note = 2'-O-methylguanosine
  modified_base 49: mod_base = OTHER; note = 2'-O-methyluridine
  modified_base 50: mod_base = OTHER; note = 2'-O-methylguanosine
  modified_base 51: mod_base = OTHER; note = 2'-O-methyluridine
  modified_base 52: mod_base = OTHER; note = 2'-O-methylguanosine
  modified_base 57: mod_base = OTHER; note = 2'-O-methyladenosine
  modified_base 58: mod_base = OTHER; note = 2'-O-methylcytidine
  modified_base 59: mod_base = OTHER; note = 2'-O-methyluridine
  modified_base 60: mod_base = OTHER; note = 2'-O-methylcytidine
  modified_base 61: mod_base = OTHER; note = 2'-O-methylcytidine
  modified_base 62: mod_base = OTHER; note = 2'-O-methyluridine
  modified_base 64: mod_base = OTHER; note = 2'-O-methyluridine
  modified_base 65: mod_base = OTHER; note = 2'-O-methyluridine
  modified_base 70: mod_base = OTHER; note = 2'-O-methylguanosine
  modified_base 71: mod_base = OTHER; note = 2'-O-methyladenosine
  modified_base 72: mod_base = OTHER; note = 2'-O-methylcytidine
  modified_base 73: mod_base = OTHER; note = 2'-O-methylguanosine
  modified_base 74: mod_base = OTHER; note = 2'-O-methyladenosine
  modified_base 75: mod_base = OTHER; note = 2'-O-methyluridine
  modified_base 76: mod_base = OTHER; note = 2'-O-methylguanosine
  modified_base 77: mod_base = OTHER; note = 2'-O-methyluridine
  modified_base 78: mod_base = OTHER; note = 2'-O-methylcytidine
  modified_base 79: mod_base = OTHER; note = 2'-O-methyluridine
  modified_base 80: mod_base = OTHER; note = 2'-O-methylcytidine
  modified_base 81: mod_base = OTHER; note = 2'-O-methyluridine
  modified_base 82: mod_base = OTHER; note = 2'-O-methyluridine
  modified_base 83: mod_base = OTHER; note = 2'-O-methyladenosine
  modified_base 84: mod_base = OTHER; note = 2'-O-methylcytidine
  modified_base 85: mod_base = OTHER; note = 2'-O-methylguanosine
  modified_base 86: mod_base = OTHER; note = 2'-O-methyladenosine
  modified_base 87: mod_base = OTHER; note = 2'-O-methylguanosine
  modified_base 121: mod_base = OTHER; note = 2'-O-methyluridine
  modified_base 122: mod_base = OTHER; note = 2'-O-methyluridine phosphorothioate
  modified_base 123: mod_base = OTHER; note = 2'-O-methyluridine phosphorothioate
  modified_base 124: mod_base = OTHER; note = 2'-O-methyluridine

SEQ ID NO: 333 - RNA, 124 nt, synthetic construct; identical to SEQ ID NO: 1
  source 1..124: mol_type = other RNA
  modified_base 1: mod_base = OTHER; note = 2'-O-methylguanosine phosphorothioate
  modified_base 2: mod_base = OTHER; note = 2'-O-methyluridine phosphorothioate
  modified_base 4: mod_base = OTHER; note = 2'-O-methylcytidine
  modified_base 5: mod_base = OTHER; note = 2'-O-methyluridine
  modified_base 6: mod_base = OTHER; note = 2'-O-methylguanosine
  modified_base 7: mod_base = OTHER; note = 2'-O-methyluridine
  modified_base 11: mod_base = OTHER; note = 2'-O-methyluridine
  modified_base 16: mod_base = OTHER; note = 2'-O-methylcytidine
  modified_base 17: mod_base = OTHER; note = 2'-O-methyladenosine
  modified_base 18: mod_base = OTHER; note = 2'-O-methylguanosine
  modified_base 19: mod_base = OTHER; note = 2'-O-methylguanosine
  modified_base 20: mod_base = OTHER; note = 2'-O-methyladenosine
  modified_base 21: mod_base = OTHER; note = 2'-O-methylcytidine
  modified_base 25: mod_base = OTHER; note = 2'-O-methylcytidine
  modified_base 26: mod_base = OTHER; note = 2'-O-methylguanosine
  modified_base 27: mod_base = OTHER; note = 2'-O-methyluridine
  modified_base 28: mod_base = OTHER; note = 2'-O-methylcytidine
  modified_base 29: mod_base = OTHER; note = 2'-O-methyluridine
  modified_base 30: mod_base = OTHER; note = 2'-O-methyladenosine
  modified_base 31: mod_base = OTHER; note = 2'-O-methylguanosine
  modified_base 39: mod_base = OTHER; note = 2'-O-methyluridine
  modified_base 42: mod_base = OTHER; note = 2'-O-methyluridine
  modified_base 45: mod_base = OTHER; note = 2'-O-methyladenosine
  modified_base 46: mod_base = OTHER; note = 2'-O-methylguanosine
  modified_base 47: mod_base = OTHER; note = 2'-O-methylguanosine
  modified_base 48: mod_base = OTHER; note = 2'-O-methylguanosine
  modified_base 49: mod_base = OTHER; note = 2'-O-methyluridine
  modified_base 50: mod_base = OTHER; note = 2'-O-methylguanosine
  modified_base 51: mod_base = OTHER; note = 2'-O-methyluridine
  modified_base 52: mod_base = OTHER; note = 2'-O-methylguanosine
  modified_base 57: mod_base = OTHER; note = 2'-O-methyladenosine
  modified_base 58: mod_base = OTHER; note = 2'-O-methylcytidine
  modified_base 59: mod_base = OTHER; note = 2'-O-methyluridine
  modified_base 60: mod_base = OTHER; note = 2'-O-methylcytidine
  modified_base 61: mod_base = OTHER; note = 2'-O-methylcytidine
  modified_base 62: mod_base = OTHER; note = 2'-O-methyluridine
  modified_base 64: mod_base = OTHER; note = 2'-O-methyluridine
  modified_base 65: mod_base = OTHER; note = 2'-O-methyluridine
  modified_base 70: mod_base = OTHER; note = 2'-O-methylguanosine
  modified_base 71: mod_base = OTHER; note = 2'-O-methyladenosine
  modified_base 72: mod_base = OTHER; note = 2'-O-methylcytidine
  modified_base 73: mod_base = OTHER; note = 2'-O-methylguanosine
  modified_base 74: mod_base = OTHER; note = 2'-O-methyladenosine
  modified_base 75: mod_base = OTHER; note = 2'-O-methyluridine
  modified_base 76: mod_base = OTHER; note = 2'-O-methylguanosine
  modified_base 77: mod_base = OTHER; note = 2'-O-methyluridine
  modified_base 78: mod_base = OTHER; note = 2'-O-methylcytidine
  modified_base 79: mod_base = OTHER; note = 2'-O-methyluridine
  modified_base 80: mod_base = OTHER; note = 2'-O-methylcytidine
  modified_base 81: mod_base = OTHER; note = 2'-O-methyluridine
  modified_base 82: mod_base = OTHER; note = 2'-O-methyluridine
  modified_base 83: mod_base = OTHER; note = 2'-O-methyladenosine
  modified_base 84: mod_base = OTHER; note = 2'-O-methylcytidine
  modified_base 85: mod_base = OTHER; note = 2'-O-methylguanosine
  modified_base 86: mod_base = OTHER; note = 2'-O-methyladenosine
  modified_base 87: mod_base = OTHER; note = 2'-O-methylguanosine
  modified_base 117: mod_base = OTHER; note = 2'-O-methyluridine
  modified_base 118: mod_base = OTHER; note = 2'-O-methyladenosine
  modified_base 119: mod_base = OTHER; note = 2'-O-methyladenosine
  modified_base 120: mod_base = OTHER; note = 2'-O-methyladenosine
  modified_base 121: mod_base = OTHER; note = 2'-O-methyluridine
  modified_base 122: mod_base = OTHER; note = 2'-O-methyluridine phosphorothioate
  modified_base 123: mod_base = OTHER; note = 2'-O-methyluridine phosphorothioate
  modified_base 124: mod_base = OTHER; note = 2'-O-methyluridine

SEQ ID NO: 334 - RNA, 124 nt, synthetic construct; identical to SEQ ID NO: 1
  source 1..124: mol_type = other RNA
  modified_base 1: mod_base = OTHER; note = 2'-O-methylguanosine phosphorothioate
  modified_base 2: mod_base = OTHER; note = 2'-O-methyluridine phosphorothioate
  modified_base 4: mod_base = OTHER; note = 2'-O-methylcytidine
  modified_base 5: mod_base = OTHER; note = 2'-O-methyluridine
  modified_base 6: mod_base = OTHER; note = 2'-O-methylguanosine
  modified_base 7: mod_base = OTHER; note = 2'-O-methyluridine
  modified_base 11: mod_base = OTHER; note = 2'-O-methyluridine
  modified_base 16: mod_base = OTHER; note = 2'-O-methylcytidine
  modified_base 17: mod_base = OTHER; note = 2'-O-methyladenosine
  modified_base 18: mod_base = OTHER; note = 2'-O-methylguanosine
  modified_base 19: mod_base = OTHER; note = 2'-O-methylguanosine
  modified_base 20: mod_base = OTHER; note = 2'-O-methyladenosine
  modified_base 21: mod_base = OTHER; note = 2'-O-methylcytidine
  modified_base 25: mod_base = OTHER; note = 2'-O-methylcytidine
  modified_base 26: mod_base = OTHER; note = 2'-O-methylguanosine
  modified_base 27: mod_base = OTHER; note = 2'-O-methyluridine
  modified_base 28: mod_base = OTHER; note = 2'-O-methylcytidine
  modified_base 29: mod_base = OTHER; note = 2'-O-methyluridine
  modified_base 30: mod_base = OTHER; note = 2'-O-methyladenosine
  modified_base 31: mod_base = OTHER; note = 2'-O-methylguanosine
  modified_base 39: mod_base = OTHER; note = 2'-O-methyluridine
  modified_base 42: mod_base = OTHER; note = 2'-O-methyluridine
  modified_base 45: mod_base = OTHER; note = 2'-O-methyladenosine
  modified_base 46: mod_base = OTHER; note = 2'-O-methylguanosine
  modified_base 47: mod_base = OTHER; note = 2'-O-methylguanosine
  modified_base 48: mod_base = OTHER; note = 2'-O-methylguanosine
  modified_base 49: mod_base = OTHER; note = 2'-O-methyluridine
  modified_base 50: mod_base = OTHER; note = 2'-O-methylguanosine
  modified_base 51: mod_base = OTHER; note = 2'-O-methyluridine
  modified_base 52: mod_base = OTHER; note = 2'-O-methylguanosine
  modified_base 57: mod_base = OTHER; note = 2'-O-methyladenosine
  modified_base 58: mod_base = OTHER; note = 2'-O-methylcytidine
  modified_base 59: mod_base = OTHER; note = 2'-O-methyluridine
  modified_base 60: mod_base = OTHER; note = 2'-O-methylcytidine
  modified_base 61: mod_base = OTHER; note = 2'-O-methylcytidine
  modified_base 62: mod_base = OTHER; note = 2'-O-methyluridine
  modified_base 64: mod_base = OTHER; note = 2'-O-methyluridine
  modified_base 65: mod_base = OTHER; note = 2'-O-methyluridine
  modified_base 70: mod_base = OTHER; note = 2'-O-methylguanosine
  modified_base 71: mod_base = OTHER; note = 2'-O-methyladenosine
  modified_base 72: mod_base = OTHER; note = 2'-O-methylcytidine
  modified_base 73: mod_base = OTHER; note = 2'-O-methylguanosine
  modified_base 74: mod_base = OTHER; note = 2'-O-methyladenosine
  modified_base 75: mod_base = OTHER; note = 2'-O-methyluridine
  modified_base 76: mod_base = OTHER; note = 2'-O-methylguanosine
  modified_base 77: mod_base = OTHER; note = 2'-O-methyluridine
  modified_base 78: mod_base = OTHER; note = 2'-O-methylcytidine
  modified_base 79: mod_base = OTHER; note = 2'-O-methyluridine
  modified_base 80: mod_base = OTHER; note = 2'-O-methylcytidine
  modified_base 81: mod_base = OTHER; note = 2'-O-methyluridine
  modified_base 82: mod_base = OTHER; note = 2'-O-methyluridine
  modified_base 83: mod_base = OTHER; note = 2'-O-methyladenosine
  modified_base 84: mod_base = OTHER; note = 2'-O-methylcytidine
  modified_base 85: mod_base = OTHER; note = 2'-O-methylguanosine
  modified_base 86: mod_base = OTHER; note = 2'-O-methyladenosine
  modified_base 87: mod_base = OTHER; note = 2'-O-methylguanosine
  modified_base 98: mod_base = OTHER; note = 2'-O-methyladenosine
  modified_base 104: mod_base = OTHER; note = 2'-O-methylcytidine
  modified_base 105: mod_base = OTHER; note = 2'-O-methyladenosine
  modified_base 109: mod_base = OTHER; note = 2'-O-methyluridine
  modified_base 110: mod_base = OTHER; note = 2'-O-methyladenosine
  modified_base 117: mod_base = OTHER; note = 2'-O-methyluridine
  modified_base 118: mod_base = OTHER; note = 2'-O-methyladenosine
  modified_base 119: mod_base = OTHER; note = 2'-O-methyladenosine
  modified_base 120: mod_base = OTHER; note = 2'-O-methyladenosine
  modified_base 121: mod_base = OTHER; note = 2'-O-methyluridine
  modified_base 122: mod_base = OTHER; note = 2'-O-methyluridine phosphorothioate
  modified_base 123: mod_base = OTHER; note = 2'-O-methyluridine phosphorothioate
  modified_base 124: mod_base = OTHER; note = 2'-O-methyluridine

SEQ ID NO: 335 - RNA, 124 nt, synthetic construct; identical to SEQ ID NO: 1
  source 1..124: mol_type = other RNA
  modified_base 1: mod_base = OTHER; note = 2'-O-methylguanosine phosphorothioate
  modified_base 2: mod_base = OTHER; note = 2'-O-methyluridine phosphorothioate
  modified_base 3: mod_base = OTHER; note = 2'-O-methyluridine
  modified_base 121: mod_base = OTHER; note = 2'-O-methyluridine
  modified_base 122: mod_base = OTHER; note = 2'-O-methyluridine phosphorothioate
  modified_base 123: mod_base = OTHER; note = 2'-O-methyluridine phosphorothioate
  modified_base 124: mod_base = OTHER; note = 2'-O-methyluridine

SEQ ID NO: 336 - RNA, 124 nt, synthetic construct; identical to SEQ ID NO: 1
  source 1..124: mol_type = other RNA
  modified_base 1: mod_base = OTHER; note = 2'-O-methylguanosine phosphorothioate
  modified_base 2: mod_base = OTHER; note = 2'-O-methyluridine phosphorothioate
  modified_base 3: mod_base = OTHER; note = 2'-O-methyluridine
  modified_base 4: mod_base = OTHER; note = 2'-O-methylcytidine
  modified_base 5: mod_base = OTHER; note = 2'-O-methyluridine
  modified_base 6: mod_base = OTHER; note = 2'-O-methylguanosine
  modified_base 7: mod_base = OTHER; note = 2'-O-methyluridine
  modified_base 11: mod_base = OTHER; note = 2'-O-methyluridine
  modified_base 16: mod_base = OTHER; note = 2'-O-methylcytidine
  modified_base 17: mod_base = OTHER; note = 2'-O-methyladenosine
  modified_base 18: mod_base = OTHER; note = 2'-O-methylguanosine
  modified_base 19: mod_base = OTHER; note = 2'-O-methylguanosine
  modified_base 20: mod_base = OTHER; note = 2'-O-methyladenosine
  modified_base 21: mod_base = OTHER; note = 2'-O-methylcytidine
  modified_base 25: mod_base = OTHER; note = 2'-O-methylcytidine
  modified_base 26: mod_base = OTHER; note = 2'-O-methylguanosine
  modified_base 27: mod_base = OTHER; note = 2'-O-methyluridine
  modified_base 28: mod_base = OTHER; note = 2'-O-methylcytidine
  modified_base 29: mod_base = OTHER; note = 2'-O-methyluridine
  modified_base 30: mod_base = OTHER; note = 2'-O-methyladenosine
  modified_base 31: mod_base = OTHER; note = 2'-O-methylguanosine
  modified_base 39: mod_base = OTHER; note = 2'-O-methyluridine
  modified_base 42: mod_base = OTHER; note = 2'-O-methyluridine
  modified_base 45: mod_base = OTHER; note = 2'-O-methyladenosine
  modified_base 46: mod_base = OTHER; note = 2'-O-methylguanosine
  modified_base 47: mod_base = OTHER; note = 2'-O-methylguanosine
  modified_base 48: mod_base = OTHER; note = 2'-O-methylguanosine
  modified_base 49: mod_base = OTHER; note = 2'-O-methyluridine
  modified_base 50: mod_base = OTHER; note = 2'-O-methylguanosine
  modified_base 51: mod_base = OTHER; note = 2'-O-methyluridine
  modified_base 52: mod_base = OTHER; note = 2'-O-methylguanosine
  modified_base 57: mod_base = OTHER; note = 2'-O-methyladenosine
  modified_base 58: mod_base = OTHER; note = 2'-O-methylcytidine
  modified_base 59: mod_base = OTHER; note = 2'-O-methyluridine
  modified_base 60: mod_base = OTHER; note = 2'-O-methylcytidine
  modified_base 61: mod_base = OTHER; note = 2'-O-methylcytidine
  modified_base 62: mod_base = OTHER; note = 2'-O-methyluridine
  modified_base 64: mod_base = OTHER; note = 2'-O-methyluridine
  modified_base 65: mod_base = OTHER; note = 2'-O-methyluridine
  modified_base 70: mod_base = OTHER; note = 2'-O-methylguanosine
  modified_base 71: mod_base = OTHER; note = 2'-O-methyladenosine
  modified_base 72: mod_base = OTHER; note = 2'-O-methylcytidine
  modified_base 73: mod_base = OTHER; note = 2'-O-methylguanosine
  modified_base 74: mod_base = OTHER; note = 2'-O-methyladenosine
  modified_base 75: mod_base = OTHER; note = 2'-O-methyluridine
  modified_base 76: mod_base = OTHER; note = 2'-O-methylguanosine
  modified_base 77: mod_base = OTHER; note = 2'-O-methyluridine
  modified_base 78: mod_base = OTHER; note = 2'-O-methylcytidine
  modified_base 79: mod_base = OTHER; note = 2'-O-methyluridine
  modified_base 80: mod_base = OTHER; note = 2'-O-methylcytidine
  modified_base 81: mod_base = OTHER; note = 2'-O-methyluridine
  modified_base 82: mod_base = OTHER; note = 2'-O-methyluridine
  modified_base 83: mod_base = OTHER; note = 2'-O-methyladenosine
  modified_base 84: mod_base = OTHER; note = 2'-O-methylcytidine
  modified_base 85: mod_base = OTHER; note = 2'-O-methylguanosine
  modified_base 86: mod_base = OTHER; note = 2'-O-methyladenosine
  modified_base 87: mod_base = OTHER; note = 2'-O-methylguanosine
  modified_base 117: mod_base = OTHER; note = 2'-O-methyluridine
  modified_base 121: mod_base = OTHER; note = 2'-O-methyluridine
  modified_base 122: mod_base = OTHER; note = 2'-O-methyluridine phosphorothioate
  modified_base 123: mod_base = OTHER; note = 2'-O-methyluridine phosphorothioate
  modified_base 124: mod_base = OTHER; note = 2'-O-methyluridine

SEQ ID NO: 337 - RNA, 124 nt, synthetic construct; identical to SEQ ID NO: 1
  source 1..124: mol_type = other RNA
  modified_base 1: mod_base = OTHER; note = 2'-O-methylguanosine phosphorothioate
  modified_base 2: mod_base = OTHER; note = 2'-O-methyluridine phosphorothioate
  modified_base 3: mod_base = OTHER; note = 2'-O-methyluridine
  modified_base 98: mod_base = OTHER; note = 2'-O-methyladenosine
  modified_base 104: mod_base = OTHER; note = 2'-O-methylcytidine
  modified_base 105: mod_base = OTHER; note = 2'-O-methyladenosine
  modified_base 109: mod_base = OTHER; note = 2'-O-methyluridine
  modified_base 110: mod_base = OTHER; note = 2'-O-methyladenosine
  modified_base 117: mod_base = OTHER; note = 2'-O-methyluridine
  modified_base 118: mod_base = OTHER; note = 2'-O-methyladenosine
  modified_base 119: mod_base = OTHER; note = 2'-O-methyladenosine
  modified_base 120: mod_base = OTHER; note = 2'-O-methyladenosine
  modified_base 121: mod_base = OTHER; note = 2'-O-methyluridine
  modified_base 122: mod_base = OTHER; note = 2'-O-methyluridine phosphorothioate
  modified_base 123: mod_base = OTHER; note = 2'-O-methyluridine phosphorothioate
  modified_base 124: mod_base = OTHER; note = 2'-O-methyluridine

SEQ ID NO: 338 - RNA, 124 nt, synthetic construct; identical to SEQ ID NO: 1
  source 1..124: mol_type = other RNA
  modified_base 1: mod_base = OTHER; note = 2'-O-methylguanosine phosphorothioate
  modified_base 2: mod_base = OTHER; note = 2'-O-methyluridine phosphorothioate
  modified_base 3: mod_base = OTHER; note = 2'-O-methyluridine
  modified_base 4: mod_base = OTHER; note = 2'-O-methylcytidine
  modified_base 5: mod_base = OTHER; note = 2'-O-methyluridine
  modified_base 6: mod_base = OTHER; note = 2'-O-methylguanosine
  modified_base 7: mod_base = OTHER; note = 2'-O-methyluridine
  modified_base 11: mod_base = OTHER; note = 2'-O-methyluridine
  modified_base 16: mod_base = OTHER; note = 2'-O-methylcytidine
  modified_base 17: mod_base = OTHER; note = 2'-O-methyladenosine
  modified_base 18: mod_base = OTHER; note = 2'-O-methylguanosine
  modified_base 19: mod_base = OTHER; note = 2'-O-methylguanosine
  modified_base 20: mod_base = OTHER; note = 2'-O-methyladenosine
  modified_base 21: mod_base = OTHER; note = 2'-O-methylcytidine
  modified_base 25: mod_base = OTHER; note = 2'-O-methylcytidine
  modified_base 26: mod_base = OTHER; note = 2'-O-methylguanosine
  modified_base 27: mod_base = OTHER; note = 2'-O-methyluridine
  modified_base 28: mod_base = OTHER; note = 2'-O-methylcytidine
  modified_base 29: mod_base = OTHER; note = 2'-O-methyluridine
  modified_base 30: mod_base = OTHER; note = 2'-O-methyladenosine
  modified_base 31: mod_base = OTHER; note = 2'-O-methylguanosine
  modified_base 39: mod_base = OTHER; note = 2'-O-methyluridine
  modified_base 42: mod_base = OTHER; note = 2'-O-methyluridine
  modified_base 45: mod_base = OTHER; note = 2'-O-methyladenosine
  modified_base 46: mod_base = OTHER; note = 2'-O-methylguanosine
  modified_base 47: mod_base = OTHER; note = 2'-O-methylguanosine
  modified_base 48: mod_base = OTHER; note = 2'-O-methylguanosine
  modified_base 49: mod_base = OTHER; note = 2'-O-methyluridine
  modified_base 50: mod_base = OTHER; note = 2'-O-methylguanosine
  modified_base 51: mod_base = OTHER; note = 2'-O-methyluridine
  modified_base 52: mod_base = OTHER; note = 2'-O-methylguanosine
  modified_base 57: mod_base = OTHER; note = 2'-O-methyladenosine
  modified_base 58: mod_base = OTHER; note = 2'-O-methylcytidine
  modified_base 59: mod_base = OTHER; note = 2'-O-methyluridine
  modified_base 60: mod_base = OTHER; note = 2'-O-methylcytidine
  modified_base 61: mod_base = OTHER; note = 2'-O-methylcytidine
  modified_base 62: mod_base = OTHER; note = 2'-O-methyluridine
  modified_base 64: mod_base = OTHER; note = 2'-O-methyluridine
  modified_base 65: mod_base = OTHER; note = 2'-O-methyluridine
  modified_base 70: mod_base = OTHER; note = 2'-O-methylguanosine
  modified_base 71: mod_base = OTHER; note = 2'-O-methyladenosine
  modified_base 72: mod_base = OTHER; note = 2'-O-methylcytidine
  modified_base 73: mod_base = OTHER; note = 2'-O-methylguanosine
  modified_base 74: mod_base = OTHER; note = 2'-O-methyladenosine
  modified_base 75: mod_base = OTHER; note = 2'-O-methyluridine
  modified_base 76: mod_base = OTHER; note = 2'-O-methylguanosine
  modified_base 77: mod_base = OTHER; note = 2'-O-methyluridine
  modified_base 78: mod_base = OTHER; note = 2'-O-methylcytidine
  modified_base 79: mod_base = OTHER; note = 2'-O-methyluridine
  modified_base 80: mod_base = OTHER; note = 2'-O-methylcytidine
  modified_base 81: mod_base = OTHER; note = 2'-O-methyluridine
  modified_base 82: mod_base = OTHER; note = 2'-O-methyluridine
  modified_base 83: mod_base = OTHER; note = 2'-O-methyladenosine
  modified_base 84: mod_base = OTHER; note = 2'-O-methylcytidine
  modified_base 85: mod_base = OTHER; note = 2'-O-methylguanosine
  modified_base 86: mod_base = OTHER; note = 2'-O-methyladenosine
  modified_base 87: mod_base = OTHER; note = 2'-O-methylguanosine
  modified_base 121: mod_base = OTHER; note = 2'-O-methyluridine
  modified_base 122: mod_base = OTHER; note = 2'-O-methyluridine phosphorothioate
  modified_base 123: mod_base = OTHER; note = 2'-O-methyluridine phosphorothioate
  modified_base 124: mod_base = OTHER; note = 2'-O-methyluridine

SEQ ID NO: 339 - RNA, 124 nt, synthetic construct; identical to SEQ ID NO: 1
  source 1..124: mol_type = other RNA
  modified_base 1: mod_base = OTHER; note = 2'-O-methylguanosine phosphorothioate
  modified_base 2: mod_base = OTHER; note = 2'-O-methyluridine phosphorothioate
  modified_base 3: mod_base = OTHER; note = 2'-O-methyluridine
  modified_base 4: mod_base = OTHER; note = 2'-O-methylcytidine
  modified_base 5: mod_base = OTHER; note = 2'-O-methyluridine
  modified_base 6: mod_base = OTHER; note = 2'-O-methylguanosine
  modified_base 7: mod_base = OTHER; note = 2'-O-methyluridine
  modified_base 11: mod_base = OTHER; note = 2'-O-methyluridine
  modified_base 16: mod_base = OTHER; note = 2'-O-methylcytidine
  modified_base 17: mod_base = OTHER; note = 2'-O-methyladenosine
  modified_base 18: mod_base = OTHER; note = 2'-O-methylguanosine
  modified_base 19: mod_base = OTHER; note = 2'-O-methylguanosine
  modified_base 20: mod_base = OTHER; note = 2'-O-methyladenosine
  modified_base 21: mod_base = OTHER; note = 2'-O-methylcytidine
  modified_base 25: mod_base = OTHER; note = 2'-O-methylcytidine
  modified_base 26: mod_base = OTHER; note = 2'-O-methylguanosine
  modified_base 27: mod_base = OTHER; note = 2'-O-methyluridine
  modified_base 28: mod_base = OTHER; note = 2'-O-methylcytidine
  modified_base 29: mod_base = OTHER; note = 2'-O-methyluridine
  modified_base 30: mod_base = OTHER; note = 2'-O-methyladenosine
  modified_base 31: mod_base = OTHER; note = 2'-O-methylguanosine
  modified_base 39: mod_base = OTHER; note = 2'-O-methyluridine
  modified_base 42: mod_base = OTHER; note = 2'-O-methyluridine
  modified_base 45: mod_base = OTHER; note = 2'-O-methyladenosine
  modified_base 46: mod_base = OTHER; note = 2'-O-methylguanosine
  modified_base 47: mod_base = OTHER; note = 2'-O-methylguanosine
  modified_base 48: mod_base = OTHER; note = 2'-O-methylguanosine
  modified_base 49: mod_base = OTHER; note = 2'-O-methyluridine
  modified_base 50: mod_base = OTHER; note = 2'-O-methylguanosine
  modified_base 51: mod_base = OTHER; note = 2'-O-methyluridine
  modified_base 52: mod_base = OTHER; note = 2'-O-methylguanosine
  modified_base 57: mod_base = OTHER; note = 2'-O-methyladenosine
  modified_base 58: mod_base = OTHER; note = 2'-O-methylcytidine
  modified_base 59: mod_base = OTHER; note = 2'-O-methyluridine
  modified_base 60: mod_base = OTHER; note = 2'-O-methylcytidine
  modified_base 61: mod_base = OTHER; note = 2'-O-methylcytidine
  modified_base 62: mod_base = OTHER; note = 2'-O-methyluridine
  modified_base 64: mod_base = OTHER; note = 2'-O-methyluridine
  modified_base 65: mod_base = OTHER; note = 2'-O-methyluridine
  modified_base 70: mod_base = OTHER; note = 2'-O-methylguanosine
  modified_base 71: mod_base = OTHER; note = 2'-O-methyladenosine
  modified_base 72: mod_base = OTHER; note = 2'-O-methylcytidine
  modified_base 73: mod_base = OTHER; note = 2'-O-methylguanosine
  modified_base 74: mod_base = OTHER; note = 2'-O-methyladenosine
  modified_base 75: mod_base = OTHER; note = 2'-O-methyluridine
  modified_base 76: mod_base = OTHER; note = 2'-O-methylguanosine
  modified_base 77: mod_base = OTHER; note = 2'-O-methyluridine
  modified_base 78: mod_base = OTHER; note = 2'-O-methylcytidine
  modified_base 79: mod_base = OTHER; note = 2'-O-methyluridine
  modified_base 80: mod_base = OTHER; note = 2'-O-methylcytidine
  modified_base 81: mod_base = OTHER; note = 2'-O-methyluridine
  modified_base 82: mod_base = OTHER; note = 2'-O-methyluridine
  modified_base 83: mod_base = OTHER; note = 2'-O-methyladenosine
  modified_base 84: mod_base = OTHER; note = 2'-O-methylcytidine
  modified_base 85: mod_base = OTHER; note = 2'-O-methylguanosine
  modified_base 86: mod_base = OTHER; note = 2'-O-methyladenosine
  modified_base 87: mod_base = OTHER; note = 2'-O-methylguanosine
  modified_base 117: mod_base = OTHER; note = 2'-O-methyluridine
  modified_base 118: mod_base = OTHER; note = 2'-O-methyladenosine
  modified_base 119: mod_base = OTHER; note = 2'-O-methyladenosine
  modified_base 120: mod_base = OTHER; note = 2'-O-methyladenosine
  modified_base 121: mod_base = OTHER; note = 2'-O-methyluridine
  modified_base 122: mod_base = OTHER; note = 2'-O-methyluridine phosphorothioate
  modified_base 123: mod_base = OTHER; note = 2'-O-methyluridine phosphorothioate
  modified_base 124: mod_base = OTHER; note = 2'-O-methyluridine

SEQ ID NO: 340 - RNA, 124 nt, synthetic construct; identical to SEQ ID NO: 1
  source 1..124: mol_type = other RNA
  modified_base 1: mod_base = OTHER; note = 2'-O-methylguanosine phosphorothioate
  modified_base 2: mod_base = OTHER; note = 2'-O-methyluridine phosphorothioate
  modified_base 3: mod_base = OTHER; note = 2'-O-methyluridine
  modified_base 4: mod_base = OTHER; note = 2'-O-methylcytidine
  modified_base 5: mod_base = OTHER; note = 2'-O-methyluridine
  modified_base 6: mod_base = OTHER; note = 2'-O-methylguanosine
  modified_base 7: mod_base = OTHER; note = 2'-O-methyluridine
  modified_base 11: mod_base = OTHER; note = 2'-O-methyluridine
  modified_base 16: mod_base = OTHER; note = 2'-O-methylcytidine
  modified_base 17: mod_base = OTHER; note = 2'-O-methyladenosine
  modified_base 18: mod_base = OTHER; note = 2'-O-methylguanosine
  modified_base 19: mod_base = OTHER; note = 2'-O-methylguanosine
  modified_base 20: mod_base = OTHER; note = 2'-O-methyladenosine
  modified_base 21: mod_base = OTHER; note = 2'-O-methylcytidine
  modified_base 25: mod_base = OTHER; note = 2'-O-methylcytidine
  modified_base 26: mod_base = OTHER; note = 2'-O-methylguanosine
  modified_base 27: mod_base = OTHER; note = 2'-O-methyluridine
  modified_base 28: mod_base = OTHER; note = 2'-O-methylcytidine
  modified_base 29: mod_base = OTHER; note = 2'-O-methyluridine
  modified_base 30: mod_base = OTHER; note = 2'-O-methyladenosine
  modified_base 31: mod_base = OTHER; note = 2'-O-methylguanosine
  modified_base 39: mod_base = OTHER; note = 2'-O-methyluridine
  modified_base 42: mod_base = OTHER; note = 2'-O-methyluridine
  modified_base 45: mod_base = OTHER; note = 2'-O-methyladenosine
  modified_base 46: mod_base = OTHER; note = 2'-O-methylguanosine
  modified_base 47: mod_base = OTHER; note = 2'-O-methylguanosine
  modified_base 48: mod_base = OTHER; note = 2'-O-methylguanosine
  modified_base 49: mod_base = OTHER; note = 2'-O-methyluridine
  modified_base 50: mod_base = OTHER; note = 2'-O-methylguanosine
  modified_base 51: mod_base = OTHER; note = 2'-O-methyluridine
  modified_base 52: mod_base = OTHER; note = 2'-O-methylguanosine
  modified_base 57: mod_base = OTHER; note = 2'-O-methyladenosine
  modified_base 58: mod_base = OTHER; note = 2'-O-methylcytidine
  modified_base 59: mod_base = OTHER; note = 2'-O-methyluridine
  modified_base 60: mod_base = OTHER; note = 2'-O-methylcytidine
  modified_base 61: mod_base = OTHER; note = 2'-O-methylcytidine
  modified_base 62: mod_base = OTHER; note = 2'-O-methyluridine
  modified_base 64: mod_base = OTHER; note = 2'-O-methyluridine
  modified_base 65: mod_base = OTHER; note = 2'-O-methyluridine
  modified_base 70: mod_base = OTHER; note = 2'-O-methylguanosine
  modified_base 71: mod_base = OTHER; note = 2'-O-methyladenosine
  modified_base 72: mod_base = OTHER; note = 2'-O-methylcytidine
  modified_base 73: mod_base = OTHER; note = 2'-O-methylguanosine
  modified_base 74: mod_base = OTHER; note = 2'-O-methyladenosine
  modified_base 75: mod_base = OTHER; note = 2'-O-methyluridine
  modified_base 76: mod_base = OTHER; note = 2'-O-methylguanosine
  modified_base 77: mod_base = OTHER; note = 2'-O-methyluridine
  modified_base 78: mod_base = OTHER; note = 2'-O-methylcytidine
  modified_base 79: mod_base = OTHER; note = 2'-O-methyluridine
  modified_base 80: mod_base = OTHER; note = 2'-O-methylcytidine
  modified_base 81: mod_base = OTHER; note = 2'-O-methyluridine
  modified_base 82: mod_base = OTHER; note = 2'-O-methyluridine
  modified_base 83: mod_base = OTHER; note = 2'-O-methyladenosine
  modified_base 84: mod_base = OTHER; note = 2'-O-methylcytidine
  modified_base 85: mod_base = OTHER; note = 2'-O-methylguanosine
  modified_base 86: mod_base = OTHER; note = 2'-O-methyladenosine
  modified_base 87: mod_base = OTHER; note = 2'-O-methylguanosine
  modified_base 98: mod_base = OTHER; note = 2'-O-methyladenosine
  modified_base 104: mod_base = OTHER; note = 2'-O-methylcytidine
  modified_base 105: mod_base = OTHER; note = 2'-O-methyladenosine
  modified_base 109: mod_base = OTHER; note = 2'-O-methyluridine
  modified_base 110: mod_base = OTHER; note = 2'-O-methyladenosine
  modified_base 117: mod_base = OTHER; note = 2'-O-methyluridine
  modified_base 118: mod_base = OTHER; note = 2'-O-methyladenosine
  modified_base 119: mod_base = OTHER; note = 2'-O-methyladenosine
  modified_base 120: mod_base = OTHER; note = 2'-O-methyladenosine
  modified_base 121: mod_base = OTHER; note = 2'-O-methyluridine
  modified_base 122: mod_base = OTHER; note = 2'-O-methyluridine phosphorothioate
  modified_base 123: mod_base = OTHER; note = 2'-O-methyluridine phosphorothioate
  modified_base 124: mod_base = OTHER; note = 2'-O-methyluridine

SEQ ID NO: 341 - RNA, 124 nt, synthetic construct; identical to SEQ ID NO: 7
  source 1..124: mol_type = other RNA
  modified_base 1: mod_base = OTHER; note = 2'-O-methylguanosine phosphorothioate
  modified_base 2: mod_base = OTHER; note = 2'-O-methyluridine phosphorothioate
  modified_base 4: mod_base = OTHER; note = 2'-O-methylcytidine
  modified_base 5: mod_base = OTHER; note = 2'-O-methyluridine
  modified_base 6: mod_base = OTHER; note = 2'-O-methylguanosine
  modified_base 7: mod_base = OTHER; note = 2'-O-methyluridine
  modified_base 11: mod_base = OTHER; note = 2'-O-methyluridine
  modified_base 16: mod_base = OTHER; note = 2'-O-methylcytidine
  modified_base 17: mod_base = OTHER; note = 2'-O-methyladenosine
  modified_base 18: mod_base = OTHER; note = 2'-O-methylguanosine
  modified_base 19: mod_base = OTHER; note = 2'-O-methylguanosine
  modified_base 20: mod_base = OTHER; note = 2'-O-methyladenosine
  modified_base 21: mod_base = OTHER; note = 2'-O-methylcytidine
  modified_base 25: mod_base = OTHER; note = 2'-O-methylcytidine
  modified_base 26: mod_base = OTHER; note = 2'-O-methylguanosine
  modified_base 27: mod_base = OTHER; note = 2'-O-methyluridine
  modified_base 28: mod_base = OTHER; note = 2'-O-methylcytidine
  modified_base 29: mod_base = OTHER; note = 2'-O-methyluridine
  modified_base 30: mod_base = OTHER; note = 2'-O-methyladenosine
  modified_base 31: mod_base = OTHER; note = 2'-O-methylguanosine
  modified_base 39: mod_base = OTHER; note = 2'-O-methyluridine
  modified_base 42: mod_base = OTHER; note = 2'-O-methyluridine
  modified_base 45: mod_base = OTHER; note = 2'-O-methyladenosine
  modified_base 46: mod_base = OTHER; note = 2'-O-methylguanosine
  modified_base 47: mod_base = OTHER; note = 2'-O-methylguanosine
  modified_base 48: mod_base = OTHER; note = 2'-O-methylguanosine
  modified_base 49: mod_base = OTHER; note = 2'-O-methyluridine
  modified_base 50: mod_base = OTHER; note = 2'-O-methylguanosine
  modified_base 51: mod_base = OTHER; note = 2'-O-methyluridine
  modified_base 52: mod_base = OTHER; note = 2'-O-methylguanosine
  modified_base 57: mod_base = OTHER; note = 2'-O-methyladenosine
  modified_base 58: mod_base = OTHER; note = 2'-O-methylcytidine
  modified_base 59: mod_base = OTHER; note = 2'-O-methyluridine
  modified_base 60: mod_base = OTHER; note = 2'-O-methylcytidine
  modified_base 61: mod_base = OTHER; note = 2'-O-methylcytidine
  modified_base 62: mod_base = OTHER; note = 2'-O-methyluridine
  modified_base 64: mod_base = OTHER; note = 2'-O-methyluridine
  modified_base 65: mod_base = OTHER; note = 2'-O-methyluridine
  modified_base 70: mod_base = OTHER; note = 2'-O-methylguanosine
  modified_base 71: mod_base = OTHER; note = 2'-O-methyladenosine
  modified_base 72: mod_base = OTHER; note = 2'-O-methylcytidine
  modified_base 73: mod_base = OTHER; note = 2'-O-methylguanosine
  modified_base 74: mod_base = OTHER; note = 2'-O-methyladenosine
  modified_base 75: mod_base = OTHER; note = 2'-O-methyluridine
  modified_base 76: mod_base = OTHER; note = 2'-O-methylguanosine
  modified_base 77: mod_base = OTHER; note = 2'-O-methyluridine
  modified_base 78: mod_base = OTHER; note = 2'-O-methylcytidine
  modified_base 79: mod_base = OTHER; note = 2'-O-methyluridine
  modified_base 80: mod_base = OTHER; note = 2'-O-methylcytidine
  modified_base 81: mod_base = OTHER; note = 2'-O-methyluridine
  modified_base 82: mod_base = OTHER; note = 2'-O-methyluridine
  modified_base 83: mod_base = OTHER; note = 2'-O-methyladenosine
  modified_base 84: mod_base = OTHER; note = 2'-O-methylcytidine
  modified_base 85: mod_base = OTHER; note = 2'-O-methylguanosine
  modified_base 86: mod_base = OTHER; note = 2'-O-methyladenosine
  modified_base 87: mod_base = OTHER; note = 2'-O-methylguanosine
  modified_base 117: mod_base = OTHER; note = 2'-O-methyladenosine
  modified_base 118: mod_base = OTHER; note = 2'-O-methyluridine
  modified_base 119: mod_base = OTHER; note = 2'-O-methyluridine
  modified_base 120: mod_base = OTHER; note = 2'-O-methylcytidine
  modified_base 121: mod_base = OTHER; note = 2'-O-methyluridine
  modified_base 122: mod_base = OTHER; note = 2'-O-methyluridine phosphorothioate
  modified_base 123: mod_base = OTHER; note = 2'-O-methyluridine phosphorothioate
  modified_base 124: mod_base = OTHER; note = 2'-O-methyluridine

SEQ ID NO: 342 - RNA, 124 nt, synthetic construct; identical to SEQ ID NO: 7
  source 1..124: mol_type = other RNA
  modified_base 1: mod_base = OTHER; note = 2'-O-methylguanosine phosphorothioate
  modified_base 2: mod_base = OTHER; note = 2'-O-methyluridine phosphorothioate
  modified_base 4: mod_base = OTHER; note = 2'-O-methylcytidine
  modified_base 5: mod_base = OTHER; note = 2'-O-methyluridine
  modified_base 6: mod_base = OTHER; note = 2'-O-methylguanosine
  modified_base 7: mod_base = OTHER; note = 2'-O-methyluridine
  modified_base 11: mod_base = OTHER; note = 2'-O-methyluridine
  modified_base 16: mod_base = OTHER; note = 2'-O-methylcytidine
  modified_base 17: mod_base = OTHER; note = 2'-O-methyladenosine
  modified_base 18: mod_base = OTHER; note = 2'-O-methylguanosine
  modified_base 19: mod_base = OTHER; note = 2'-O-methylguanosine
  modified_base 20: mod_base = OTHER; note = 2'-O-methyladenosine
  modified_base 21: mod_base = OTHER; note = 2'-O-methylcytidine
  modified_base 25: mod_base = OTHER; note = 2'-O-methylcytidine
  modified_base 26: mod_base = OTHER; note = 2'-O-methylguanosine
  modified_base 27: mod_base = OTHER; note = 2'-O-methyluridine
  modified_base 28: mod_base = OTHER; note = 2'-O-methylcytidine
  modified_base 29: mod_base = OTHER; note = 2'-O-methyluridine
  modified_base 30: mod_base = OTHER; note = 2'-O-methyladenosine
  modified_base 31: mod_base = OTHER; note = 2'-O-methylguanosine
  modified_base 39: mod_base = OTHER; note = 2'-O-methyluridine
  modified_base 42: mod_base = OTHER; note = 2'-O-methyluridine
  modified_base 45: mod_base = OTHER; note = 2'-O-methyladenosine
  modified_base 46: mod_base = OTHER; note = 2'-O-methylguanosine
  modified_base 47: mod_base = OTHER; note = 2'-O-methylguanosine
  modified_base 48: mod_base = OTHER; note = 2'-O-methylguanosine
  modified_base 49: mod_base = OTHER; note = 2'-O-methyluridine
  modified_base 50: mod_base = OTHER; note = 2'-O-methylguanosine
  modified_base 51: mod_base = OTHER; note = 2'-O-methyluridine
  modified_base 52: mod_base = OTHER; note = 2'-O-methylguanosine
  modified_base 57: mod_base = OTHER; note = 2'-O-methyladenosine
  modified_base 58: mod_base = OTHER; note = 2'-O-methylcytidine
  modified_base 59: mod_base = OTHER; note = 2'-O-methyluridine
  modified_base 60: mod_base = OTHER; note = 2'-O-methylcytidine
  modified_base 61: mod_base = OTHER; note = 2'-O-methylcytidine
  modified_base 62: mod_base = OTHER; note = 2'-O-methyluridine
  modified_base 64: mod_base = OTHER; note = 2'-O-methyluridine
  modified_base 65: mod_base = OTHER; note = 2'-O-methyluridine
  modified_base 70: mod_base = OTHER; note = 2'-O-methylguanosine
  modified_base 71: mod_base = OTHER; note = 2'-O-methyladenosine
  modified_base 72: mod_base = OTHER; note = 2'-O-methylcytidine
  modified_base 73: mod_base = OTHER; note = 2'-O-methylguanosine
  modified_base 74: mod_base = OTHER; note = 2'-O-methyladenosine
  modified_base 75: mod_base = OTHER; note = 2'-O-methyluridine
  modified_base 76: mod_base = OTHER; note = 2'-O-methylguanosine
  modified_base 77: mod_base = OTHER; note = 2'-O-methyluridine
  modified_base 78: mod_base = OTHER; note = 2'-O-methylcytidine
  modified_base 79: mod_base = OTHER; note = 2'-O-methyluridine
  modified_base 80: mod_base = OTHER; note = 2'-O-methylcytidine
  modified_base 81: mod_base = OTHER; note = 2'-O-methyluridine
  modified_base 82: mod_base = OTHER; note = 2'-O-methyluridine
  modified_base 83: mod_base = OTHER; note = 2'-O-methyladenosine
  modified_base 84: mod_base = OTHER; note = 2'-O-methylcytidine
  modified_base 85: mod_base = OTHER; note = 2'-O-methylguanosine
  modified_base 86: mod_base = OTHER; note = 2'-O-methyladenosine
  modified_base 87: mod_base = OTHER; note = 2'-O-methylguanosine
  modified_base 98: mod_base = OTHER; note = 2'-O-methyladenosine
  modified_base 104: mod_base = OTHER; note = 2'-O-methyluridine
  modified_base 105: mod_base = OTHER; note = 2'-O-methylcytidine
  modified_base 109: mod_base = OTHER; note = 2'-O-methylguanosine
  modified_base 110: mod_base = OTHER; note = 2'-O-methylguanosine
  modified_base 117: mod_base = OTHER; note = 2'-O-methyladenosine
  modified_base 118: mod_base = OTHER; note = 2'-O-methyluridine
  modified_base 119: mod_base = OTHER; note = 2'-O-methyluridine
  modified_base 120: mod_base = OTHER; note = 2'-O-methylcytidine
  modified_base 121: mod_base = OTHER; note = 2'-O-methyluridine
  modified_base 122: mod_base = OTHER; note = 2'-O-methyluridine phosphorothioate
  modified_base 123: mod_base = OTHER; note = 2'-O-methyluridine phosphorothioate
  modified_base 124: mod_base = OTHER; note = 2'-O-methyluridine

SEQ ID NO: 343 - RNA, 124 nt, synthetic construct; identical to SEQ ID NO: 7
  source 1..124: mol_type = other RNA
  modified_base 1: mod_base = OTHER; note = 2'-O-methylguanosine phosphorothioate
  modified_base 2: mod_base = OTHER; note = 2'-O-methyluridine phosphorothioate
  modified_base 3: mod_base = OTHER; note = 2'-O-methyluridine
  modified_base 4: mod_base = OTHER; note = 2'-O-methylcytidine
  modified_base 5: mod_base = OTHER; note = 2'-O-methyluridine
  modified_base 6: mod_base = OTHER; note = 2'-O-methylguanosine
  modified_base 7: mod_base = OTHER; note = 2'-O-methyluridine
  modified_base 11: mod_base = OTHER; note = 2'-O-methyluridine
  modified_base 16: mod_base = OTHER; note = 2'-O-methylcytidine
  modified_base 17: mod_base = OTHER; note = 2'-O-methyladenosine
  modified_base 18: mod_base = OTHER; note = 2'-O-methylguanosine
  modified_base 19: mod_base = OTHER; note = 2'-O-methylguanosine
  modified_base 20: mod_base = OTHER; note = 2'-O-methyladenosine
  modified_base 21: mod_base = OTHER; note = 2'-O-methylcytidine
  modified_base 25: mod_base = OTHER; note = 2'-O-methylcytidine
  modified_base 26: mod_base = OTHER; note = 2'-O-methylguanosine
  modified_base 27: mod_base = OTHER; note = 2'-O-methyluridine
  modified_base 28: mod_base = OTHER; note = 2'-O-methylcytidine
  modified_base 29: mod_base = OTHER; note = 2'-O-methyluridine
  modified_base 30: mod_base = OTHER; note = 2'-O-methyladenosine
  modified_base 31: mod_base = OTHER; note = 2'-O-methylguanosine
  modified_base 39: mod_base = OTHER; note = 2'-O-methyluridine
  modified_base 42: mod_base = OTHER; note = 2'-O-methyluridine
  modified_base 45: mod_base = OTHER; note = 2'-O-methyladenosine
  modified_base 46: mod_base = OTHER; note = 2'-O-methylguanosine
  modified_base 47: mod_base = OTHER; note = 2'-O-methylguanosine
  modified_base 48: mod_base = OTHER; note = 2'-O-methylguanosine
  modified_base 49: mod_base = OTHER; note = 2'-O-methyluridine
  modified_base 50: mod_base = OTHER; note = 2'-O-methylguanosine
  modified_base 51: mod_base = OTHER; note = 2'-O-methyluridine
  modified_base 52: mod_base = OTHER; note = 2'-O-methylguanosine
  modified_base 57: mod_base = OTHER; note = 2'-O-methyladenosine
  modified_base 58: mod_base = OTHER; note = 2'-O-methylcytidine
  modified_base 59: mod_base = OTHER; note = 2'-O-methyluridine
  modified_base 60: mod_base = OTHER; note = 2'-O-methylcytidine
  modified_base 61: mod_base = OTHER; note = 2'-O-methylcytidine
  modified_base 62: mod_base = OTHER; note = 2'-O-methyluridine
  modified_base 64: mod_base = OTHER; note = 2'-O-methyluridine
  modified_base 65: mod_base = OTHER; note = 2'-O-methyluridine
  modified_base 70: mod_base = OTHER; note = 2'-O-methylguanosine
  modified_base 71: mod_base = OTHER; note = 2'-O-methyladenosine
  modified_base 72: mod_base = OTHER; note = 2'-O-methylcytidine
  modified_base 73: mod_base = OTHER; note = 2'-O-methylguanosine
  modified_base 74: mod_base = OTHER; note = 2'-O-methyladenosine
  modified_base 75: mod_base = OTHER; note = 2'-O-methyluridine
  modified_base 76: mod_base = OTHER; note = 2'-O-methylguanosine
  modified_base 77: mod_base = OTHER; note = 2'-O-methyluridine
  modified_base 78: mod_base = OTHER; note = 2'-O-methylcytidine
  modified_base 79: mod_base = OTHER; note = 2'-O-methyluridine
  modified_base 80: mod_base = OTHER; note = 2'-O-methylcytidine
  modified_base 81: mod_base = OTHER; note = 2'-O-methyluridine
  modified_base 82: mod_base = OTHER; note = 2'-O-methyluridine
  modified_base 83: mod_base = OTHER; note = 2'-O-methyladenosine
  modified_base 84: mod_base = OTHER; note = 2'-O-methylcytidine
  modified_base 85: mod_base = OTHER; note = 2'-O-methylguanosine
  modified_base 86: mod_base = OTHER; note = 2'-O-methyladenosine
  modified_base 87: mod_base = OTHER; note = 2'-O-methylguanosine
  modified_base 117: mod_base = OTHER; note = 2'-O-methyladenosine
  modified_base 118: mod_base = OTHER; note = 2'-O-methyluridine
  modified_base 119: mod_base = OTHER; note = 2'-O-methyluridine
  modified_base 120: mod_base = OTHER; note = 2'-O-methylcytidine
  modified_base 121: mod_base = OTHER; note = 2'-O-methyluridine
  modified_base 122: mod_base = OTHER; note = 2'-O-methyluridine phosphorothioate
  modified_base 123: mod_base = OTHER; note = 2'-O-methyluridine phosphorothioate
  modified_base 124: mod_base = OTHER; note = 2'-O-methyluridine

SEQ ID NO: 344 - RNA, 124 nt, synthetic construct; identical to SEQ ID NO: 7
  source 1..124: mol_type = other RNA
  modified_base 1: mod_base = OTHER; note = 2'-O-methylguanosine phosphorothioate
  modified_base 2: mod_base = OTHER; note = 2'-O-methyluridine phosphorothioate
  modified_base 3: mod_base = OTHER; note = 2'-O-methyluridine
  modified_base 4: mod_base = OTHER; note = 2'-O-methylcytidine
  modified_base 5: mod_base = OTHER; note = 2'-O-methyluridine
  modified_base 6: mod_base = OTHER; note = 2'-O-methylguanosine
  modified_base 7: mod_base = OTHER; note = 2'-O-methyluridine
  modified_base 11: mod_base = OTHER; note = 2'-O-methyluridine
  modified_base 16: mod_base = OTHER; note = 2'-O-methylcytidine
  modified_base 17: mod_base = OTHER; note = 2'-O-methyladenosine
  modified_base 18: mod_base = OTHER; note = 2'-O-methylguanosine
  modified_base 19: mod_base = OTHER; note = 2'-O-methylguanosine
  modified_base 20: mod_base = OTHER; note = 2'-O-methyladenosine
  modified_base 21: mod_base = OTHER; note = 2'-O-methylcytidine
  modified_base 25: mod_base = OTHER; note = 2'-O-methylcytidine
  modified_base 26: mod_base = OTHER; note = 2'-O-methylguanosine
  modified_base 27: mod_base = OTHER; note = 2'-O-methyluridine
  modified_base 28: mod_base = OTHER; note = 2'-O-methylcytidine
  modified_base 29: mod_base = OTHER; note = 2'-O-methyluridine
  modified_base 30: mod_base = OTHER; note = 2'-O-methyladenosine
  modified_base 31: mod_base = OTHER; note = 2'-O-methylguanosine
  modified_base 39: mod_base = OTHER; note = 2'-O-methyluridine
  modified_base 42: mod_base = OTHER; note = 2'-O-methyluridine
  modified_base 45: mod_base = OTHER; note = 2'-O-methyladenosine
  modified_base 46: mod_base = OTHER; note = 2'-O-methylguanosine
  modified_base 47: mod_base = OTHER; note = 2'-O-methylguanosine
  modified_base 48: mod_base = OTHER; note = 2'-O-methylguanosine
  modified_base 49: mod_base = OTHER; note = 2'-O-methyluridine
  modified_base 50: mod_base = OTHER; note = 2'-O-methylguanosine
  modified_base 51: mod_base = OTHER; note = 2'-O-methyluridine
  modified_base 52: mod_base = OTHER; note = 2'-O-methylguanosine
  modified_base 57: mod_base = OTHER; note = 2'-O-methyladenosine
  modified_base 58: mod_base = OTHER; note = 2'-O-methylcytidine
  modified_base 59: mod_base = OTHER; note = 2'-O-methyluridine
  modified_base 60: mod_base = OTHER; note = 2'-O-methylcytidine
  modified_base 61: mod_base = OTHER; note = 2'-O-methylcytidine
  modified_base 62: mod_base = OTHER; note = 2'-O-methyluridine
  modified_base 64: mod_base = OTHER; note = 2'-O-methyluridine
  modified_base 65: mod_base = OTHER; note = 2'-O-methyluridine
  modified_base 70: mod_base = OTHER; note = 2'-O-methylguanosine
  modified_base 71: mod_base = OTHER; note = 2'-O-methyladenosine
  modified_base 72: mod_base = OTHER; note = 2'-O-methylcytidine
  modified_base 73: mod_base = OTHER; note = 2'-O-methylguanosine
  modified_base 74: mod_base = OTHER; note = 2'-O-methyladenosine
  modified_base 75: mod_base = OTHER; note = 2'-O-methyluridine
  modified_base 76: mod_base = OTHER; note = 2'-O-methylguanosine
  modified_base 77: mod_base = OTHER; note = 2'-O-methyluridine
  modified_base 78: mod_base = OTHER; note = 2'-O-methylcytidine
  modified_base 79: mod_base = OTHER; note = 2'-O-methyluridine
  modified_base 80: mod_base = OTHER; note = 2'-O-methylcytidine
  modified_base 81: mod_base = OTHER; note = 2'-O-methyluridine
  modified_base 82: mod_base = OTHER; note = 2'-O-methyluridine
  modified_base 83: mod_base = OTHER; note = 2'-O-methyladenosine
  modified_base 84: mod_base = OTHER; note = 2'-O-methylcytidine
  modified_base 85: mod_base = OTHER; note = 2'-O-methylguanosine
  modified_base 86: mod_base = OTHER; note = 2'-O-methyladenosine
  modified_base 87: mod_base = OTHER; note = 2'-O-methylguanosine
  modified_base 98: mod_base = OTHER; note = 2'-O-methyladenosine
  modified_base 104: mod_base = OTHER; note = 2'-O-methyluridine
  modified_base 105: mod_base = OTHER; note = 2'-O-methylcytidine
  modified_base 109: mod_base = OTHER; note = 2'-O-methylguanosine
  modified_base 110: mod_base = OTHER; note = 2'-O-methylguanosine
  modified_base 117: mod_base = OTHER; note = 2'-O-methyladenosine
  modified_base 118: mod_base = OTHER; note = 2'-O-methyluridine
  modified_base 119: mod_base = OTHER; note = 2'-O-methyluridine
  modified_base 120: mod_base = OTHER; note = 2'-O-methylcytidine
  modified_base 121: mod_base = OTHER; note = 2'-O-methyluridine
  modified_base 122: mod_base = OTHER; note = 2'-O-methyluridine phosphorothioate
  modified_base 123: mod_base = OTHER; note = 2'-O-methyluridine phosphorothioate
  modified_base 124: mod_base = OTHER; note = 2'-O-methyluridine

SEQ ID NO: 345 - RNA, 120 nt, synthetic construct; identical to SEQ ID NO: 2
  source 1..120: mol_type = other RNA
  modified_base 1: mod_base = OTHER; note = 2'-O-methylguanosine phosphorothioate
  modified_base 2: mod_base = OTHER; note = 2'-O-methyluridine phosphorothioate
  modified_base 5: mod_base = OTHER; note = 2'-O-methyluridine
  modified_base 16: mod_base = OTHER; note = 2'-O-methylcytidine
  modified_base 21: mod_base = OTHER; note = 2'-O-methylcytidine
  modified_base 25: mod_base = OTHER; note = 2'-O-methylcytidine
  modified_base 26: mod_base = OTHER; note = 2'-O-methylguanosine
  modified_base 29: mod_base = OTHER; note = 2'-O-methyluridine
  modified_base 30: mod_base = OTHER; note = 2'-O-methyladenosine
  modified_base 44: mod_base = OTHER; note = 2'-O-methylcytidine
  modified_base 45: mod_base = OTHER; note = 2'-O-methyladenosine
  modified_base 49: mod_base = OTHER; note = 2'-O-methyluridine
  modified_base 50: mod_base = OTHER; note = 2'-O-methylguanosine
  modified_base 62: mod_base = OTHER; note = 2'-O-methyluridine
  modified_base 63: mod_base = OTHER; note = 2'-O-methyladenosine
  modified_base 67: mod_base = OTHER; note = 2'-O-methylcytidine
  modified_base 68: mod_base = OTHER; note = 2'-O-methyluridine
  modified_base 69: mod_base = OTHER; note = 2'-O-methylguanosine
  modified_base 72: mod_base = OTHER; note = 2'-O-methylcytidine
  modified_base 75: mod_base = OTHER; note = 2'-O-methyluridine
  modified_base 76: mod_base = OTHER; note = 2'-O-methylguanosine
  modified_base 79: mod_base = OTHER; note = 2'-O-methyluridine
  modified_base 82: mod_base = OTHER; note = 2'-O-methyluridine
  modified_base 83: mod_base = OTHER; note = 2'-O-methyladenosine
  modified_base 84: mod_base = OTHER; note = 2'-O-methylcytidine
  modified_base 117: mod_base = OTHER; note = 2'-O-methyluridine
  modified_base 118: mod_base = OTHER; note = 2'-O-methyladenosine phosphorothioate
  modified_base 119: mod_base = OTHER; note = 2'-O-methyladenosine phosphorothioate
  modified_base 120: mod_base = OTHER; note = 2'-O-methyladenosine

SEQ ID NO: 346 - RNA, 120 nt, synthetic construct; identical to SEQ ID NO: 2
  source 1..120: mol_type = other RNA
  modified_base 1: mod_base = OTHER; note = 2'-O-methylguanosine phosphorothioate
  modified_base 2: mod_base = OTHER; note = 2'-O-methyluridine phosphorothioate
  modified_base 5: mod_base = OTHER; note = 2'-O-methyluridine
  modified_base 16: mod_base = OTHER; note = 2'-O-methylcytidine
  modified_base 21: mod_base = OTHER; note = 2'-O-methylcytidine
  modified_base 25: mod_base = OTHER; note = 2'-O-methylcytidine
  modified_base 26: mod_base = OTHER; note = 2'-O-methylguanosine
  modified_base 29: mod_base = OTHER; note = 2'-O-methyluridine
  modified_base 30: mod_base = OTHER; note = 2'-O-methyladenosine
  modified_base 33: mod_base = OTHER; note = 2'-O-methyluridine
  modified_base 35: mod_base = OTHER; note = 2'-O-methyluridine
  modified_base 37: mod_base = OTHER; note = 2'-O-methyladenosine
  modified_base 39: mod_base = OTHER; note = 2'-O-methyluridine
  modified_base 44: mod_base = OTHER; note = 2'-O-methylcytidine
  modified_base 45: mod_base = OTHER; note = 2'-O-methyladenosine
  modified_base 47: mod_base = OTHER; note = 2'-O-methylguanosine
  modified_base 49: mod_base = OTHER; note = 2'-O-methyluridine
  modified_base 50: mod_base = OTHER; note = 2'-O-methylguanosine
  modified_base 51: mod_base = OTHER; note = 2'-O-methyluridine
  modified_base 62: mod_base = OTHER; note = 2'-O-methyluridine
  modified_base 63: mod_base = OTHER; note = 2'-O-methyladenosine
  modified_base 65: mod_base = OTHER; note = 2'-O-methyluridine
  modified_base 67: mod_base = OTHER; note = 2'-O-methylcytidine
  modified_base 68: mod_base = OTHER; note = 2'-O-methyluridine
  modified_base 69: mod_base = OTHER; note = 2'-O-methylguanosine
  modified_base 72: mod_base = OTHER; note = 2'-O-methylcytidine
  modified_base 75: mod_base = OTHER; note = 2'-O-methyluridine
  modified_base 76: mod_base = OTHER; note = 2'-O-methylguanosine
  modified_base 79: mod_base = OTHER; note = 2'-O-methyluridine
  modified_base 82: mod_base = OTHER; note = 2'-O-methyluridine
  modified_base 83: mod_base = OTHER; note = 2'-O-methyladenosine
  modified_base 84: mod_base = OTHER; note = 2'-O-methylcytidine
  modified_base 86: mod_base = OTHER; note = 2'-O-methyladenosine
  modified_base 87: mod_base = OTHER; note = 2'-O-methylguanosine
  modified_base 89: mod_base = OTHER; note = 2'-O-methylcytidine
  modified_base 92: mod_base = OTHER; note = 2'-O-methyluridine
  modified_base 95: mod_base = OTHER; note = 2'-O-methylcytidine
  modified_base 117: mod_base = OTHER; note = 2'-O-methyluridine
  modified_base 118: mod_base = OTHER; note = 2'-O-methyladenosine phosphorothioate
  modified_base 119: mod_base = OTHER; note = 2'-O-methyladenosine phosphorothioate
  modified_base 120: mod_base = OTHER; note = 2'-O-methyladenosine

SEQ ID NO: 347 - RNA, 120 nt, synthetic construct; identical to SEQ ID NO: 2
  source 1..120: mol_type = other RNA
  modified_base 1: mod_base = OTHER; note = 2'-O-methylguanosine phosphorothioate
  modified_base 2: mod_base = OTHER; note = 2'-O-methyluridine phosphorothioate
  modified_base 109: mod_base = OTHER; note = 2'-O-methyluridine
  modified_base 113: mod_base = OTHER; note = 2'-O-methylcytidine
  modified_base 117: mod_base = OTHER; note = 2'-O-methyluridine
  modified_base 118: mod_base = OTHER; note = 2'-O-methyladenosine phosphorothioate
  modified_base 119: mod_base = OTHER; note = 2'-O-methyladenosine phosphorothioate
  modified_base 120: mod_base = OTHER; note = 2'-O-methyladenosine

SEQ ID NO: 348 - RNA, 120 nt, synthetic construct; identical to SEQ ID NO: 2
  source 1..120: mol_type = other RNA
  modified_base 1: mod_base = OTHER; note = 2'-O-methylguanosine phosphorothioate
  modified_base 2: mod_base = OTHER; note = 2'-O-methyluridine phosphorothioate
  modified_base 5: mod_base = OTHER; note = 2'-O-methyluridine
  modified_base 16: mod_base = OTHER; note = 2'-O-methylcytidine
  modified_base 21: mod_base = OTHER; note = 2'-O-methylcytidine
  modified_base 25: mod_base = OTHER; note = 2'-O-methylcytidine
  modified_base 26: mod_base = OTHER; note = 2'-O-methylguanosine
  modified_base 29: mod_base = OTHER; note = 2'-O-methyluridine
  modified_base 30: mod_base = OTHER; note = 2'-O-methyladenosine
  modified_base 44: mod_base = OTHER; note = 2'-O-methylcytidine
  modified_base 45: mod_base = OTHER; note = 2'-O-methyladenosine
  modified_base 49: mod_base = OTHER; note = 2'-O-methyluridine
  modified_base 50: mod_base = OTHER; note = 2'-O-methylguanosine
  modified_base 62: mod_base = OTHER; note = 2'-O-methyluridine
  modified_base 63: mod_base = OTHER; note = 2'-O-methyladenosine
  modified_base 67: mod_base = OTHER; note = 2'-O-methylcytidine
  modified_base 68: mod_base = OTHER; note = 2'-O-methyluridine
  modified_base 69: mod_base = OTHER; note = 2'-O-methylguanosine
  modified_base 72: mod_base = OTHER; note = 2'-O-methylcytidine
  modified_base 75: mod_base = OTHER; note = 2'-O-methyluridine
  modified_base 76: mod_base = OTHER; note = 2'-O-methylguanosine
  modified_base 79: mod_base = OTHER; note = 2'-O-methyluridine
  modified_base 82: mod_base = OTHER; note = 2'-O-methyluridine
  modified_base 83: mod_base = OTHER; note = 2'-O-methyladenosine
  modified_base 84: mod_base = OTHER; note = 2'-O-methylcytidine
  modified_base 109: mod_base = OTHER; note = 2'-O-methyluridine
  modified_base 113: mod_base = OTHER; note = 2'-O-methylcytidine
  modified_base 117: mod_base = OTHER; note = 2'-O-methyluridine
  modified_base 118: mod_base = OTHER; note = 2'-O-methyladenosine phosphorothioate
  modified_base 119: mod_base = OTHER; note = 2'-O-methyladenosine phosphorothioate
  modified_base 120: mod_base = OTHER; note = 2'-O-methyladenosine

SEQ ID NO: 349 - RNA, 120 nt, synthetic construct; identical to SEQ ID NO: 2
  source 1..120: mol_type = other RNA
  modified_base 1: mod_base = OTHER; note = 2'-O-methylguanosine phosphorothioate
  modified_base 2: mod_base = OTHER; note = 2'-O-methyluridine phosphorothioate
  modified_base 5: mod_base = OTHER; note = 2'-O-methyluridine
  modified_base 16: mod_base = OTHER; note = 2'-O-methylcytidine
  modified_base 21: mod_base = OTHER; note = 2'-O-methylcytidine
  modified_base 25: mod_base = OTHER; note = 2'-O-methylcytidine
  modified_base 26: mod_base = OTHER; note = 2'-O-methylguanosine
  modified_base 29: mod_base = OTHER; note = 2'-O-methyluridine
  modified_base 30: mod_base = OTHER; note = 2'-O-methyladenosine
  modified_base 33: mod_base = OTHER; note = 2'-O-methyluridine
  modified_base 35: mod_base = OTHER; note = 2'-O-methyluridine
  modified_base 37: mod_base = OTHER; note = 2'-O-methyladenosine
  modified_base 39: mod_base = OTHER; note = 2'-O-methyluridine
  modified_base 44: mod_base = OTHER; note = 2'-O-methylcytidine
  modified_base 45: mod_base = OTHER; note = 2'-O-methyladenosine
  modified_base 47: mod_base = OTHER; note = 2'-O-methylguanosine
  modified_base 49: mod_base = OTHER; note = 2'-O-methyluridine
  modified_base 50: mod_base = OTHER; note = 2'-O-methylguanosine
  modified_base 51: mod_base = OTHER; note = 2'-O-methyluridine
  modified_base 62: mod_base = OTHER; note = 2'-O-methyluridine
  modified_base 63: mod_base = OTHER; note = 2'-O-methyladenosine
  modified_base 65: mod_base = OTHER; note = 2'-O-methyluridine
  modified_base 67: mod_base = OTHER; note = 2'-O-methylcytidine
  modified_base 68: mod_base = OTHER; note = 2'-O-methyluridine
  modified_base 69: mod_base = OTHER; note = 2'-O-methylguanosine
  modified_base 72: mod_base = OTHER; note = 2'-O-methylcytidine
  modified_base 75: mod_base = OTHER; note = 2'-O-methyluridine
  modified_base 76: mod_base = OTHER; note = 2'-O-methylguanosine
  modified_base 79: mod_base = OTHER; note = 2'-O-methyluridine
  modified_base 82: mod_base = OTHER; note = 2'-O-methyluridine
  modified_base 83: mod_base = OTHER; note = 2'-O-methyladenosine
  modified_base 84: mod_base = OTHER; note = 2'-O-methylcytidine
  modified_base 86: mod_base = OTHER; note = 2'-O-methyladenosine
  modified_base 87: mod_base = OTHER; note = 2'-O-methylguanosine
  modified_base 89: mod_base = OTHER; note = 2'-O-methylcytidine
  modified_base 92: mod_base = OTHER; note = 2'-O-methyluridine
  modified_base 95: mod_base = OTHER; note = 2'-O-methylcytidine
  modified_base 109: mod_base = OTHER; note = 2'-O-methyluridine
  modified_base 113: mod_base = OTHER; note = 2'-O-methylcytidine
  modified_base 117: mod_base = OTHER; note = 2'-O-methyluridine
  modified_base 118: mod_base = OTHER; note = 2'-O-methyladenosine phosphorothioate
  modified_base 119: mod_base = OTHER; note = 2'-O-methyladenosine phosphorothioate
  modified_base 120: mod_base = OTHER; note = 2'-O-methyladenosine

SEQ ID NO: 350 - RNA, 120 nt, synthetic construct; identical to SEQ ID NO: 2
  source 1..120: mol_type = other RNA
  modified_base 1: mod_base = OTHER; note = 2'-O-methylguanosine phosphorothioate
  modified_base 2: mod_base = OTHER; note = 2'-O-methyluridine phosphorothioate
  modified_base 4: mod_base = OTHER; note = 2'-O-methylcytidine
  modified_base 5: mod_base = OTHER; note = 2'-O-methyluridine
  modified_base 6: mod_base = OTHER; note = 2'-O-methylguanosine
  modified_base 7: mod_base = OTHER; note = 2'-O-methyluridine
  modified_base 11: mod_base = OTHER; note = 2'-O-methyluridine
  modified_base 16: mod_base = OTHER; note = 2'-O-methylcytidine
  modified_base 17: mod_base = OTHER; note = 2'-O-methyladenosine
  modified_base 18: mod_base = OTHER; note = 2'-O-methylguanosine
  modified_base 19: mod_base = OTHER; note = 2'-O-methylguanosine
  modified_base 20: mod_base = OTHER; note = 2'-O-methyladenosine
  modified_base 21: mod_base = OTHER; note = 2'-O-methylcytidine
  modified_base 25: mod_base = OTHER; note = 2'-O-methylcytidine
  modified_base 26: mod_base = OTHER; note = 2'-O-methylguanosine
  modified_base 27: mod_base = OTHER; note = 2'-O-methyluridine
  modified_base 28: mod_base = OTHER; note = 2'-O-methylcytidine
  modified_base 29: mod_base = OTHER; note = 2'-O-methyluridine
  modified_base 30: mod_base = OTHER; note = 2'-O-methyladenosine
  modified_base 31: mod_base = OTHER; note = 2'-O-methylguanosine
  modified_base 39: mod_base = OTHER; note = 2'-O-methyluridine
  modified_base 42: mod_base = OTHER; note = 2'-O-methyluridine
  modified_base 45: mod_base = OTHER; note = 2'-O-methyladenosine
  modified_base 46: mod_base = OTHER; note = 2'-O-methylguanosine
  modified_base 47: mod_base = OTHER; note = 2'-O-methylguanosine
  modified_base 48: mod_base = OTHER; note = 2'-O-methylguanosine
  modified_base 49: mod_base = OTHER; note = 2'-O-methyluridine
  modified_base 50: mod_base = OTHER; note = 2'-O-methylguanosine
  modified_base 51: mod_base = OTHER; note = 2'-O-methyluridine
  modified_base 52: mod_base = OTHER; note = 2'-O-methylguanosine
  modified_base 57: mod_base = OTHER; note = 2'-O-methyladenosine
  modified_base 58: mod_base = OTHER; note = 2'-O-methylcytidine
  modified_base 59: mod_base = OTHER; note = 2'-O-methyluridine
  modified_base 60: mod_base = OTHER; note = 2'-O-methylcytidine
  modified_base 61: mod_base = OTHER; note = 2'-O-methylcytidine
  modified_base 62: mod_base = OTHER; note = 2'-O-methyluridine
  modified_base 64: mod_base = OTHER; note = 2'-O-methyluridine
  modified_base 65: mod_base = OTHER; note = 2'-O-methyluridine
  modified_base 70: mod_base = OTHER; note = 2'-O-methylguanosine
  modified_base 71: mod_base = OTHER; note = 2'-O-methyladenosine
  modified_base 72: mod_base = OTHER; note = 2'-O-methylcytidine
  modified_base 73: mod_base = OTHER; note = 2'-O-methylguanosine
  modified_base 74: mod_base = OTHER; note = 2'-O-methyladenosine
  modified_base 75: mod_base = OTHER; note = 2'-O-methyluridine
  modified_base 76: mod_base = OTHER; note = 2'-O-methylguanosine
  modified_base 77: mod_base = OTHER; note = 2'-O-methyluridine
  modified_base 78: mod_base = OTHER; note = 2'-O-methylcytidine
  modified_base 79: mod_base = OTHER; note = 2'-O-methyluridine
  modified_base 80: mod_base = OTHER; note = 2'-O-methylcytidine
  modified_base 81: mod_base = OTHER; note = 2'-O-methyluridine
  modified_base 82: mod_base = OTHER; note = 2'-O-methyluridine
  modified_base 83: mod_base = OTHER; note = 2'-O-methyladenosine
  modified_base 84: mod_base = OTHER; note = 2'-O-methylcytidine
  modified_base 85: mod_base = OTHER; note = 2'-O-methylguanosine
  modified_base 86: mod_base = OTHER; note = 2'-O-methyladenosine
  modified_base 87: mod_base = OTHER; note = 2'-O-methylguanosine
  modified_base 117: mod_base = OTHER; note = 2'-O-methyluridine
  modified_base 118: mod_base = OTHER; note = 2'-O-methyladenosine phosphorothioate
  modified_base 119: mod_base = OTHER; note = 2'-O-methyladenosine phosphorothioate
  modified_base 120: mod_base = OTHER; note = 2'-O-methyladenosine

SEQ ID NO: 351 - RNA, 120 nt, synthetic construct; identical to SEQ ID NO: 2
  source 1..120: mol_type = other RNA
  modified_base 1: mod_base = OTHER; note = 2'-O-methylguanosine phosphorothioate
  modified_base 2: mod_base = OTHER; note = 2'-O-methyluridine phosphorothioate
  modified_base 4: mod_base = OTHER; note = 2'-O-methylcytidine
  modified_base 5: mod_base = OTHER; note = 2'-O-methyluridine
  modified_base 6: mod_base = OTHER; note = 2'-O-methylguanosine
  modified_base 7: mod_base = OTHER; note = 2'-O-methyluridine
  modified_base 11: mod_base = OTHER; note = 2'-O-methyluridine
  modified_base 16: mod_base = OTHER; note = 2'-O-methylcytidine
  modified_base 17: mod_base = OTHER; note = 2'-O-methyladenosine
  modified_base 18: mod_base = OTHER; note = 2'-O-methylguanosine
  modified_base 19: mod_base = OTHER; note = 2'-O-methylguanosine
  modified_base 20: mod_base = OTHER; note = 2'-O-methyladenosine
  modified_base 21: mod_base = OTHER; note = 2'-O-methylcytidine
  modified_base 25: mod_base = OTHER; note = 2'-O-methylcytidine
  modified_base 26: mod_base = OTHER; note = 2'-O-methylguanosine
  modified_base 27: mod_base = OTHER; note = 2'-O-methyluridine
  modified_base 28: mod_base = OTHER; note = 2'-O-methylcytidine
  modified_base 29: mod_base = OTHER; note = 2'-O-methyluridine
  modified_base 30: mod_base = OTHER; note = 2'-O-methyladenosine
  modified_base 31: mod_base = OTHER; note = 2'-O-methylguanosine
  modified_base 45: mod_base = OTHER; note = 2'-O-methyladenosine
  modified_base 46: mod_base = OTHER; note = 2'-O-methylguanosine
  modified_base 47: mod_base = OTHER; note = 2'-O-methylguanosine
  modified_base 48: mod_base = OTHER; note = 2'-O-methylguanosine
  modified_base 49: mod_base = OTHER; note = 2'-O-methyluridine
  modified_base 50: mod_base = OTHER; note = 2'-O-methylguanosine
  modified_base 51: mod_base = OTHER; note = 2'-O-methyluridine
  modified_base 52: mod_base = OTHER; note = 2'-O-methylguanosine
  modified_base 57: mod_base = OTHER; note = 2'-O-methyladenosine
  modified_base 58: mod_base = OTHER; note = 2'-O-methylcytidine
  modified_base 59: mod_base = OTHER; note = 2'-O-methyluridine
  modified_base 60: mod_base = OTHER; note = 2'-O-methylcytidine
  modified_base 61: mod_base = OTHER; note = 2'-O-methylcytidine
  modified_base 62: mod_base = OTHER; note = 2'-O-methyluridine
  modified_base 64: mod_base = OTHER; note = 2'-O-methyluridine
  modified_base 65: mod_base = OTHER; note = 2'-O-methyluridine
  modified_base 70: mod_base = OTHER; note = 2'-O-methylguanosine
  modified_base 71: mod_base = OTHER; note = 2'-O-methyladenosine
  modified_base 72: mod_base = OTHER; note = 2'-O-methylcytidine
  modified_base 73: mod_base = OTHER; note = 2'-O-methylguanosine
  modified_base 74: mod_base = OTHER; note = 2'-O-methyladenosine
  modified_base 75: mod_base = OTHER; note = 2'-O-methyluridine
  modified_base 76: mod_base = OTHER; note = 2'-O-methylguanosine
  modified_base 77: mod_base = OTHER; note = 2'-O-methyluridine
  modified_base 78: mod_base = OTHER; note = 2'-O-methylcytidine
  modified_base 79: mod_base = OTHER; note = 2'-O-methyluridine
  modified_base 80: mod_base = OTHER; note = 2'-O-methylcytidine
  modified_base 81: mod_base = OTHER; note = 2'-O-methyluridine
  modified_base 82: mod_base = OTHER; note = 2'-O-methyluridine
  modified_base 83: mod_base = OTHER; note = 2'-O-methyladenosine
  modified_base 84: mod_base = OTHER; note = 2'-O-methylcytidine
  modified_base 85: mod_base = OTHER; note = 2'-O-methylguanosine
  modified_base 86: mod_base = OTHER; note = 2'-O-methyladenosine
  modified_base 87: mod_base = OTHER; note = 2'-O-methylguanosine
  modified_base 117: mod_base = OTHER; note = 2'-O-methyluridine
  modified_base 118: mod_base = OTHER; note = 2'-O-methyladenosine phosphorothioate
  modified_base 119: mod_base = OTHER; note = 2'-O-methyladenosine phosphorothioate
  modified_base 120: mod_base = OTHER; note = 2'-O-methyladenosine

SEQ ID NO: 352 - RNA, 120 nt, synthetic construct; identical to SEQ ID NO: 2
  source 1..120: mol_type = other RNA
  modified_base 1: mod_base = OTHER; note = 2'-O-methylguanosine phosphorothioate
  modified_base 2: mod_base = OTHER; note = 2'-O-methyluridine phosphorothioate
  modified_base 25: mod_base = OTHER; note = 2'-O-methylcytidine
  modified_base 26: mod_base = OTHER; note = 2'-O-methylguanosine
  modified_base 27: mod_base = OTHER; note = 2'-O-methyluridine
  modified_base 28: mod_base = OTHER; note = 2'-O-methylcytidine
  modified_base 29: mod_base = OTHER; note = 2'-O-methyluridine
  modified_base 30: mod_base = OTHER; note = 2'-O-methyladenosine
  modified_base 31: mod_base = OTHER; note = 2'-O-methylguanosine
  modified_base 39: mod_base = OTHER; note = 2'-O-methyluridine
  modified_base 42: mod_base = OTHER; note = 2'-O-methyluridine
  modified_base 45: mod_base = OTHER; note = 2'-O-methyladenosine
  modified_base 46: mod_base = OTHER; note = 2'-O-methylguanosine
  modified_base 47: mod_base = OTHER; note = 2'-O-methylguanosine
  modified_base 48: mod_base = OTHER; note = 2'-O-methylguanosine
  modified_base 49: mod_base = OTHER; note = 2'-O-methyluridine
  modified_base 50: mod_base = OTHER; note = 2'-O-methylguanosine
  modified_base 51: mod_base = OTHER; note = 2'-O-methyluridine
  modified_base 52: mod_base = OTHER; note = 2'-O-methylguanosine
  modified_base 57: mod_base = OTHER; note = 2'-O-methyladenosine
  modified_base 58: mod_base = OTHER; note = 2'-O-methylcytidine
  modified_base 59: mod_base = OTHER; note = 2'-O-methyluridine
  modified_base 60: mod_base = OTHER; note = 2'-O-methylcytidine
  modified_base 61: mod_base = OTHER; note = 2'-O-methylcytidine
  modified_base 62: mod_base = OTHER; note = 2'-O-methyluridine
  modified_base 64: mod_base = OTHER; note = 2'-O-methyluridine
  modified_base 65: mod_base = OTHER; note = 2'-O-methyluridine
  modified_base 70: mod_base = OTHER; note = 2'-O-methylguanosine
  modified_base 71: mod_base = OTHER; note = 2'-O-methyladenosine
  modified_base 72: mod_base = OTHER; note = 2'-O-methylcytidine
  modified_base 73: mod_base = OTHER; note = 2'-O-methylguanosine
  modified_base 74: mod_base = OTHER; note = 2'-O-methyladenosine
  modified_base 75: mod_base = OTHER; note = 2'-O-methyluridine
  modified_base 76: mod_base = OTHER; note = 2'-O-methylguanosine
  modified_base 77: mod_base = OTHER; note = 2'-O-methyluridine
  modified_base 78: mod_base = OTHER; note = 2'-O-methylcytidine
  modified_base 79: mod_base = OTHER; note = 2'-O-methyluridine
  modified_base 80: mod_base = OTHER; note = 2'-O-methylcytidine
  modified_base 81: mod_base = OTHER; note = 2'-O-methyluridine
  modified_base 82: mod_base = OTHER; note = 2'-O-methyluridine
  modified_base 83: mod_base = OTHER; note = 2'-O-methyladenosine
  modified_base 84: mod_base = OTHER; note = 2'-O-methylcytidine
  modified_base 85: mod_base = OTHER; note = 2'-O-methylguanosine
  modified_base 86: mod_base = OTHER; note = 2'-O-methyladenosine
  modified_base 87: mod_base = OTHER; note = 2'-O-methylguanosine
  modified_base 117: mod_base = OTHER; note = 2'-O-methyluridine
  modified_base 118: mod_base = OTHER; note = 2'-O-methyladenosine phosphorothioate
  modified_base 119: mod_base = OTHER; note = 2'-O-methyladenosine phosphorothioate
  modified_base 120: mod_base = OTHER; note = 2'-O-methyladenosine

SEQ ID NO: 353 - RNA, 120 nt, synthetic construct; identical to SEQ ID NO: 2
  source 1..120: mol_type = other RNA
  modified_base 1: mod_base = OTHER; note = 2'-O-methylguanosine phosphorothioate
  modified_base 2: mod_base = OTHER; note = 2'-O-methyluridine phosphorothioate
  modified_base 4: mod_base = OTHER; note = 2'-O-methylcytidine
  modified_base 5: mod_base = OTHER; note = 2'-O-methyluridine
  modified_base 6: mod_base = OTHER; note = 2'-O-methylguanosine
  modified_base 7: mod_base = OTHER; note = 2'-O-methyluridine
  modified_base 11: mod_base = OTHER; note = 2'-O-methyluridine
  modified_base 16: mod_base = OTHER; note = 2'-O-methylcytidine
  modified_base 17: mod_base = OTHER; note = 2'-O-methyladenosine
  modified_base 18: mod_base = OTHER; note = 2'-O-methylguanosine
  modified_base 19: mod_base = OTHER; note = 2'-O-methylguanosine
  modified_base 20: mod_base = OTHER; note = 2'-O-methyladenosine
  modified_base 21: mod_base = OTHER; note = 2'-O-methylcytidine
  modified_base 25: mod_base = OTHER; note = 2'-O-methylcytidine
  modified_base 26: mod_base = OTHER; note = 2'-O-methylguanosine
  modified_base 27: mod_base = OTHER; note = 2'-O-methyluridine
  modified_base 28: mod_base = OTHER; note = 2'-O-methylcytidine
  modified_base 29: mod_base = OTHER; note = 2'-O-methyluridine
  modified_base 30: mod_base = OTHER; note = 2'-O-methyladenosine
  modified_base 31: mod_base = OTHER; note = 2'-O-methylguanosine
  modified_base 39: mod_base = OTHER; note = 2'-O-methyluridine
  modified_base 42: mod_base = OTHER; note = 2'-O-methyluridine
  modified_base 64: mod_base = OTHER; note = 2'-O-methyluridine
  modified_base 65: mod_base = OTHER; note = 2'-O-methyluridine
  modified_base 70: mod_base = OTHER; note = 2'-O-methylguanosine
  modified_base 71: mod_base = OTHER; note = 2'-O-methyladenosine
  modified_base 72: mod_base = OTHER; note = 2'-O-methylcytidine
  modified_base 73: mod_base = OTHER; note = 2'-O-methylguanosine
  modified_base 74: mod_base = OTHER; note = 2'-O-methyladenosine
  modified_base 75: mod_base = OTHER; note = 2'-O-methyluridine
  modified_base 76: mod_base = OTHER; note = 2'-O-methylguanosine
  modified_base 77: mod_base = OTHER; note = 2'-O-methyluridine
  modified_base 78: mod_base = OTHER; note = 2'-O-methylcytidine
  modified_base 79: mod_base = OTHER; note = 2'-O-methyluridine
  modified_base 80: mod_base = OTHER; note = 2'-O-methylcytidine
  modified_base 81: mod_base = OTHER; note = 2'-O-methyluridine
  modified_base 82: mod_base = OTHER; note = 2'-O-methyluridine
  modified_base 83: mod_base = OTHER; note = 2'-O-methyladenosine
  modified_base 84: mod_base = OTHER; note = 2'-O-methylcytidine
  modified_base 85: mod_base = OTHER; note = 2'-O-methylguanosine
  modified_base 86: mod_base = OTHER; note = 2'-O-methyladenosine
  modified_base 87: mod_base = OTHER; note = 2'-O-methylguanosine
  modified_base 117: mod_base = OTHER; note = 2'-O-methyluridine
  modified_base 118: mod_base = OTHER; note = 2'-O-methyladenosine phosphorothioate
  modified_base 119: mod_base = OTHER; note = 2'-O-methyladenosine phosphorothioate
  modified_base 120: mod_base = OTHER; note = 2'-O-methyladenosine

SEQ ID NO: 354 - RNA, 120 nt, synthetic construct; identical to SEQ ID NO: 2
  source 1..120: mol_type = other RNA
  modified_base 1: mod_base = OTHER; note = 2'-O-methylguanosine phosphorothioate
  modified_base 2: mod_base = OTHER; note = 2'-O-methyluridine phosphorothioate
  modified_base 98: mod_base = OTHER; note = 2'-O-methyladenosine
  modified_base 104: mod_base = OTHER; note = 2'-O-methylcytidine
  modified_base 105: mod_base = OTHER; note = 2'-O-methyladenosine
  modified_base 109: mod_base = OTHER; note = 2'-O-methyluridine
  modified_base 110: mod_base = OTHER; note = 2'-O-methyladenosine
  modified_base 117: mod_base = OTHER; note = 2'-O-methyluridine
  modified_base 118: mod_base = OTHER; note = 2'-O-methyladenosine phosphorothioate
  modified_base 119: mod_base = OTHER; note = 2'-O-methyladenosine phosphorothioate
  modified_base 120: mod_base = OTHER; note = 2'-O-methyladenosine

SEQ ID NO: 355 - RNA, 120 nt, synthetic construct; identical to SEQ ID NO: 2
  source 1..120: mol_type = other RNA
  modified_base 1: mod_base = OTHER; note = 2'-O-methylguanosine phosphorothioate
  modified_base 2: mod_base = OTHER; note = 2'-O-methyluridine phosphorothioate
  modified_base 4: mod_base = OTHER; note = 2'-O-methylcytidine
  modified_base 5: mod_base = OTHER; note = 2'-O-methyluridine
  modified_base 6: mod_base = OTHER; note = 2'-O-methylguanosine
  modified_base 7: mod_base = OTHER; note = 2'-O-methyluridine
  modified_base 11: mod_base = OTHER; note = 2'-O-methyluridine
  modified_base 16: mod_base = OTHER; note = 2'-O-methylcytidine
  modified_base 17: mod_base = OTHER; note = 2'-O-methyladenosine
  modified_base 18: mod_base = OTHER; note = 2'-O-methylguanosine
  modified_base 19: mod_base = OTHER; note = 2'-O-methylguanosine
  modified_base 20: mod_base = OTHER; note = 2'-O-methyladenosine
  modified_base 21: mod_base = OTHER; note = 2'-O-methylcytidine
  modified_base 25: mod_base = OTHER; note = 2'-O-methylcytidine
  modified_base 26: mod_base = OTHER; note = 2'-O-methylguanosine
  modified_base 27: mod_base = OTHER; note = 2'-O-methyluridine
  modified_base 28: mod_base = OTHER; note = 2'-O-methylcytidine
  modified_base 29: mod_base = OTHER; note = 2'-O-methyluridine
  modified_base 30: mod_base = OTHER; note = 2'-O-methyladenosine
  modified_base 31: mod_base = OTHER; note = 2'-O-methylguanosine
  modified_base 39: mod_base = OTHER; note = 2'-O-methyluridine
  modified_base 42: mod_base = OTHER; note = 2'-O-methyluridine
  modified_base 45: mod_base = OTHER; note = 2'-O-methyladenosine
  modified_base 46: mod_base = OTHER; note = 2'-O-methylguanosine
  modified_base 47: mod_base = OTHER; note = 2'-O-methylguanosine
  modified_base 48: mod_base = OTHER; note = 2'-O-methylguanosine
  modified_base 49: mod_base = OTHER; note = 2'-O-methyluridine
  modified_base 50: mod_base = OTHER; note = 2'-O-methylguanosine
  modified_base 51: mod_base = OTHER; note = 2'-O-methyluridine
  modified_base 52: mod_base = OTHER; note = 2'-O-methylguanosine
  modified_base 57: mod_base = OTHER; note = 2'-O-methyladenosine
  modified_base 58: mod_base = OTHER; note = 2'-O-methylcytidine
  modified_base 59: mod_base = OTHER; note = 2'-O-methyluridine
  modified_base 60: mod_base = OTHER; note = 2'-O-methylcytidine
  modified_base 61: mod_base = OTHER; note = 2'-O-methylcytidine
  modified_base 62: mod_base = OTHER; note = 2'-O-methyluridine
  modified_base 64: mod_base = OTHER; note = 2'-O-methyluridine
  modified_base 65: mod_base = OTHER; note = 2'-O-methyluridine
  modified_base 70: mod_base = OTHER; note = 2'-O-methylguanosine
  modified_base 71: mod_base = OTHER; note = 2'-O-methyladenosine
  modified_base 72: mod_base = OTHER; note = 2'-O-methylcytidine
  modified_base 73: mod_base = OTHER; note = 2'-O-methylguanosine
  modified_base 74: mod_base = OTHER; note = 2'-O-methyladenosine
  modified_base 75: mod_base = OTHER; note = 2'-O-methyluridine
  modified_base 76: mod_base = OTHER; note = 2'-O-methylguanosine
  modified_base 77: mod_base = OTHER; note = 2'-O-methyluridine
  modified_base 78: mod_base = OTHER; note = 2'-O-methylcytidine
  modified_base 79: mod_base = OTHER; note = 2'-O-methyluridine
  modified_base 80: mod_base = OTHER; note = 2'-O-methylcytidine
  modified_base 81: mod_base = OTHER; note = 2'-O-methyluridine
  modified_base 82: mod_base = OTHER; note = 2'-O-methyluridine
  modified_base 83: mod_base = OTHER; note = 2'-O-methyladenosine
  modified_base 84: mod_base = OTHER; note = 2'-O-methylcytidine
  modified_base 85: mod_base = OTHER; note = 2'-O-methylguanosine
  modified_base 86: mod_base = OTHER; note = 2'-O-methyladenosine
  modified_base 87: mod_base = OTHER; note = 2'-O-methylguanosine
  modified_base 98: mod_base = OTHER; note = 2'-O-methyladenosine
  modified_base 104: mod_base = OTHER; note = 2'-O-methylcytidine
  modified_base 105: mod_base = OTHER; note = 2'-O-methyladenosine
  modified_base 109: mod_base = OTHER; note = 2'-O-methyluridine
  modified_base 110: mod_base = OTHER; note = 2'-O-methyladenosine
  modified_base 117: mod_base = OTHER; note = 2'-O-methyluridine
  modified_base 118: mod_base = OTHER; note = 2'-O-methyladenosine phosphorothioate
  modified_base 119: mod_base = OTHER; note = 2'-O-methyladenosine phosphorothioate
  modified_base 120: mod_base = OTHER; note = 2'-O-methyladenosine

SEQ ID NO: 356 - RNA, 120 nt, synthetic construct; identical to SEQ ID NO: 2
  source 1..120: mol_type = other RNA
  modified_base 1: mod_base = OTHER; note = 2'-O-methylguanosine phosphorothioate
  modified_base 2: mod_base = OTHER; note = 2'-O-methyluridine phosphorothioate
  modified_base 98: mod_base = OTHER; note = 2'-O-methyladenosine
  modified_base 101: mod_base = OTHER; note = 2'-O-methylcytidine
  modified_base 104: mod_base = OTHER; note = 2'-O-methylcytidine
  modified_base 105: mod_base = OTHER; note = 2'-O-methyladenosine
  modified_base 107: mod_base = OTHER; note = 2'-O-methylcytidine
  modified_base 109: mod_base = OTHER; note = 2'-O-methyluridine
  modified_base 110: mod_base = OTHER; note = 2'-O-methyladenosine
  modified_base 117: mod_base = OTHER; note = 2'-O-methyluridine
  modified_base 118: mod_base = OTHER; note = 2'-O-methyladenosine phosphorothioate
  modified_base 119: mod_base = OTHER; note = 2'-O-methyladenosine phosphorothioate
  modified_base 120: mod_base = OTHER; note = 2'-O-methyladenosine

SEQ ID NO: 357 - RNA, 120 nt, synthetic construct; identical to SEQ ID NO: 2
  source 1..120: mol_type = other RNA
  modified_base 1: mod_base = OTHER; note = 2'-O-methylguanosine phosphorothioate
  modified_base 2: mod_base = OTHER; note = 2'-O-methyluridine phosphorothioate
  modified_base 4: mod_base = OTHER; note = 2'-O-methylcytidine
  modified_base 5: mod_base = OTHER; note = 2'-O-methyluridine
  modified_base 6: mod_base = OTHER; note = 2'-O-methylguanosine
  modified_base 7: mod_base = OTHER; note = 2'-O-methyluridine
  modified_base 11: mod_base = OTHER; note = 2'-O-methyluridine
  modified_base 16: mod_base = OTHER; note = 2'-O-methylcytidine
  modified_base 17: mod_base = OTHER; note = 2'-O-methyladenosine
  modified_base 18: mod_base = OTHER; note = 2'-O-methylguanosine
  modified_base 19: mod_base = OTHER; note = 2'-O-methylguanosine
  modified_base 20: mod_base = OTHER; note = 2'-O-methyladenosine
  modified_base 21: mod_base = OTHER; note = 2'-O-methylcytidine
  modified_base 25: mod_base = OTHER; note = 2'-O-methylcytidine
  modified_base 26: mod_base = OTHER; note = 2'-O-methylguanosine
  modified_base 27: mod_base = OTHER; note = 2'-O-methyluridine
  modified_base 28: mod_base = OTHER; note = 2'-O-methylcytidine
  modified_base 29: mod_base = OTHER; note = 2'-O-methyluridine
  modified_base 30: mod_base = OTHER; note = 2'-O-methyladenosine
  modified_base 31: mod_base = OTHER; note = 2'-O-methylguanosine
  modified_base 33: mod_base = OTHER; note = 2'-O-methyluridine
  modified_base 39: mod_base = OTHER; note = 2'-O-methyluridine
  modified_base 42: mod_base = OTHER; note = 2'-O-methyluridine
  modified_base 45: mod_base = OTHER; note = 2'-O-methyladenosine
  modified_base 46: mod_base = OTHER; note = 2'-O-methylguanosine
  modified_base 47: mod_base = OTHER; note = 2'-O-methylguanosine
  modified_base 48: mod_base = OTHER; note = 2'-O-methylguanosine
  modified_base 49: mod_base = OTHER; note = 2'-O-methyluridine
  modified_base 50: mod_base = OTHER; note = 2'-O-methylguanosine
  modified_base 51: mod_base = OTHER; note = 2'-O-methyluridine
  modified_base 52: mod_base = OTHER; note = 2'-O-methylguanosine
  modified_base 57: mod_base = OTHER; note = 2'-O-methyladenosine
  modified_base 58: mod_base = OTHER; note = 2'-O-methylcytidine
  modified_base 59: mod_base = OTHER; note = 2'-O-methyluridine
  modified_base 60: mod_base = OTHER; note = 2'-O-methylcytidine
  modified_base 61: mod_base = OTHER; note = 2'-O-methylcytidine
  modified_base 62: mod_base = OTHER; note = 2'-O-methyluridine
  modified_base 64: mod_base = OTHER; note = 2'-O-methyluridine
  modified_base 65: mod_base = OTHER; note = 2'-O-methyluridine
  modified_base 70: mod_base = OTHER; note = 2'-O-methylguanosine
  modified_base 71: mod_base = OTHER; note = 2'-O-methyladenosine
  modified_base 72: mod_base = OTHER; note = 2'-O-methylcytidine
  modified_base 73: mod_base = OTHER; note = 2'-O-methylguanosine
  modified_base 74: mod_base = OTHER; note = 2'-O-methyladenosine
  modified_base 75: mod_base = OTHER; note = 2'-O-methyluridine
  modified_base 76: mod_base = OTHER; note = 2'-O-methylguanosine
  modified_base 77: mod_base = OTHER; note = 2'-O-methyluridine
  modified_base 78: mod_base = OTHER; note = 2'-O-methylcytidine
  modified_base 79: mod_base = OTHER; note = 2'-O-methyluridine
  modified_base 80: mod_base = OTHER; note = 2'-O-methylcytidine
  modified_base 81: mod_base = OTHER; note = 2'-O-methyluridine
  modified_base 82: mod_base = OTHER; note = 2'-O-methyluridine
  modified_base 83: mod_base = OTHER; note = 2'-O-methyladenosine
  modified_base 84: mod_base = OTHER; note = 2'-O-methylcytidine
  modified_base 85: mod_base = OTHER; note = 2'-O-methylguanosine
  modified_base 86: mod_base = OTHER; note = 2'-O-methyladenosine
  modified_base 87: mod_base = OTHER; note = 2'-O-methylguanosine
  modified_base 89: mod_base = OTHER; note = 2'-O-methylcytidine
  modified_base 98: mod_base = OTHER; note = 2'-O-methyladenosine
  modified_base 101: mod_base = OTHER; note = 2'-O-methylcytidine
  modified_base 104: mod_base = OTHER; note = 2'-O-methylcytidine
  modified_base 105: mod_base = OTHER; note = 2'-O-methyladenosine
  modified_base 107: mod_base = OTHER; note = 2'-O-methylcytidine
  modified_base 109: mod_base = OTHER; note = 2'-O-methyluridine
  modified_base 110: mod_base = OTHER; note = 2'-O-methyladenosine
  modified_base 117: mod_base = OTHER; note = 2'-O-methyluridine
  modified_base 118: mod_base = OTHER; note = 2'-O-methyladenosine phosphorothioate
  modified_base 119: mod_base = OTHER; note = 2'-O-methyladenosine phosphorothioate
  modified_base 120: mod_base = OTHER; note = 2'-O-methyladenosine

SEQ ID NO: 358 - RNA, 120 nt, synthetic construct; identical to SEQ ID NO: 2
  source 1..120: mol_type = other RNA
  modified_base 1: mod_base = OTHER; note = 2'-O-methylguanosine phosphorothioate
  modified_base 2: mod_base = OTHER; note = 2'-O-methyluridine phosphorothioate
  modified_base 3: mod_base = OTHER; note = 2'-O-methyluridine
  modified_base 117: mod_base = OTHER; note = 2'-O-methyluridine
  modified_base 118: mod_base = OTHER; note = 2'-O-methyladenosine phosphorothioate
  modified_base 119: mod_base = OTHER; note = 2'-O-methyladenosine phosphorothioate
  modified_base 120: mod_base = OTHER; note = 2'-O-methyladenosine

SEQ ID NO: 359 - RNA, 120 nt, synthetic construct; identical to SEQ ID NO: 2
  source 1..120: mol_type = other RNA
  modified_base 1: mod_base = OTHER; note = 2'-O-methylguanosine phosphorothioate
  modified_base 2: mod_base = OTHER; note = 2'-O-methyluridine phosphorothioate
  modified_base 3: mod_base = OTHER; note = 2'-O-methyluridine
  modified_base 5: mod_base = OTHER; note = 2'-O-methyluridine
  modified_base 16: mod_base = OTHER; note = 2'-O-methylcytidine
  modified_base 21: mod_base = OTHER; note = 2'-O-methylcytidine
  modified_base 25: mod_base = OTHER; note = 2'-O-methylcytidine
  modified_base 26: mod_base = OTHER; note = 2'-O-methylguanosine
  modified_base 29: mod_base = OTHER; note = 2'-O-methyluridine
  modified_base 30: mod_base = OTHER; note = 2'-O-methyladenosine
  modified_base 44: mod_base = OTHER; note = 2'-O-methylcytidine
  modified_base 45: mod_base = OTHER; note = 2'-O-methyladenosine
  modified_base 49: mod_base = OTHER; note = 2'-O-methyluridine
  modified_base 50: mod_base = OTHER; note = 2'-O-methylguanosine
  modified_base 62: mod_base = OTHER; note = 2'-O-methyluridine
  modified_base 63: mod_base = OTHER; note = 2'-O-methyladenosine
  modified_base 67: mod_base = OTHER; note = 2'-O-methylcytidine
  modified_base 68: mod_base = OTHER; note = 2'-O-methyluridine
  modified_base 69: mod_base = OTHER; note = 2'-O-methylguanosine
  modified_base 72: mod_base = OTHER; note = 2'-O-methylcytidine
  modified_base 75: mod_base = OTHER; note = 2'-O-methyluridine
  modified_base 76: mod_base = OTHER; note = 2'-O-methylguanosine
  modified_base 79: mod_base = OTHER; note = 2'-O-methyluridine
  modified_base 82: mod_base = OTHER; note = 2'-O-methyluridine
  modified_base 83: mod_base = OTHER; note = 2'-O-methyladenosine
  modified_base 84: mod_base = OTHER; note = 2'-O-methylcytidine
  modified_base 117: mod_base = OTHER; note = 2'-O-methyluridine
  modified_base 118: mod_base = OTHER; note = 2'-O-methyladenosine phosphorothioate
  modified_base 119: mod_base = OTHER; note = 2'-O-methyladenosine phosphorothioate
  modified_base 120: mod_base = OTHER; note = 2'-O-methyladenosine

SEQ ID NO: 360 - RNA, 120 nt, synthetic construct; identical to SEQ ID NO: 2
  source 1..120: mol_type = other RNA
  modified_base 1: mod_base = OTHER; note = 2'-O-methylguanosine phosphorothioate
  modified_base 2: mod_base = OTHER; note = 2'-O-methyluridine phosphorothioate
  modified_base 3: mod_base = OTHER; note = 2'-O-methyluridine
  modified_base 5: mod_base = OTHER; note = 2'-O-methyluridine
  modified_base 16: mod_base = OTHER; note = 2'-O-methylcytidine
  modified_base 21: mod_base = OTHER; note = 2'-O-methylcytidine
  modified_base 25: mod_base = OTHER; note = 2'-O-methylcytidine
  modified_base 26: mod_base = OTHER; note = 2'-O-methylguanosine
  modified_base 29: mod_base = OTHER; note = 2'-O-methyluridine
  modified_base 30: mod_base = OTHER; note = 2'-O-methyladenosine
  modified_base 33: mod_base = OTHER; note = 2'-O-methyluridine
  modified_base 35: mod_base = OTHER; note = 2'-O-methyluridine
  modified_base 37: mod_base = OTHER; note = 2'-O-methyladenosine
  modified_base 39: mod_base = OTHER; note = 2'-O-methyluridine
  modified_base 44: mod_base = OTHER; note = 2'-O-methylcytidine
  modified_base 45: mod_base = OTHER; note = 2'-O-methyladenosine
  modified_base 47: mod_base = OTHER; note = 2'-O-methylguanosine
  modified_base 49: mod_base = OTHER; note = 2'-O-methyluridine
  modified_base 50: mod_base = OTHER; note = 2'-O-methylguanosine
  modified_base 51: mod_base = OTHER; note = 2'-O-methyluridine
  modified_base 62: mod_base = OTHER; note = 2'-O-methyluridine
  modified_base 63: mod_base = OTHER; note = 2'-O-methyladenosine
  modified_base 65: mod_base = OTHER; note = 2'-O-methyluridine
  modified_base 67: mod_base = OTHER; note = 2'-O-methylcytidine
  modified_base 68: mod_base = OTHER; note = 2'-O-methyluridine
  modified_base 69: mod_base = OTHER; note = 2'-O-methylguanosine
  modified_base 72: mod_base = OTHER; note = 2'-O-methylcytidine
  modified_base 75: mod_base = OTHER; note = 2'-O-methyluridine
  modified_base 76: mod_base = OTHER; note = 2'-O-methylguanosine
  modified_base 79: mod_base = OTHER; note = 2'-O-methyluridine
  modified_base 82: mod_base = OTHER; note = 2'-O-methyluridine
  modified_base 83: mod_base = OTHER; note = 2'-O-methyladenosine
  modified_base 84: mod_base = OTHER; note = 2'-O-methylcytidine
  modified_base 86: mod_base = OTHER; note = 2'-O-methyladenosine
  modified_base 87: mod_base = OTHER; note = 2'-O-methylguanosine
  modified_base 89: mod_base = OTHER; note = 2'-O-methylcytidine
  modified_base 92: mod_base = OTHER; note = 2'-O-methyluridine
  modified_base 95: mod_base = OTHER; note = 2'-O-methylcytidine
  modified_base 117: mod_base = OTHER; note = 2'-O-methyluridine
  modified_base 118: mod_base = OTHER; note = 2'-O-methyladenosine phosphorothioate
  modified_base 119: mod_base = OTHER; note = 2'-O-methyladenosine phosphorothioate
  modified_base 120: mod_base = OTHER; note = 2'-O-methyladenosine

SEQ ID NO: 361 - RNA, 120 nt, synthetic construct; identical to SEQ ID NO: 2
  source 1..120: mol_type = other RNA
  modified_base 1: mod_base = OTHER; note = 2'-O-methylguanosine phosphorothioate
  modified_base 2: mod_base = OTHER; note = 2'-O-methyluridine phosphorothioate
  modified_base 3: mod_base = OTHER; note = 2'-O-methyluridine
  modified_base 109: mod_base = OTHER; note = 2'-O-methyluridine
  modified_base 113: mod_base = OTHER; note = 2'-O-methylcytidine
  modified_base 117: mod_base = OTHER; note = 2'-O-methyluridine
  modified_base 118: mod_base = OTHER; note = 2'-O-methyladenosine phosphorothioate
  modified_base 119: mod_base = OTHER; note = 2'-O-methyladenosine phosphorothioate
  modified_base 120: mod_base = OTHER; note = 2'-O-methyladenosine

SEQ ID NO: 362 - RNA, 120 nt, synthetic construct; identical to SEQ ID NO: 2
  source 1..120: mol_type = other RNA
  modified_base 1: mod_base = OTHER; note = 2'-O-methylguanosine phosphorothioate
  modified_base 2: mod_base = OTHER; note = 2'-O-methyluridine phosphorothioate
  modified_base 3: mod_base = OTHER; note = 2'-O-methyluridine
  modified_base 5: mod_base = OTHER; note = 2'-O-methyluridine
  modified_base 16: mod_base = OTHER; note = 2'-O-methylcytidine
  modified_base 21: mod_base = OTHER; note = 2'-O-methylcytidine
  modified_base 25: mod_base = OTHER; note = 2'-O-methylcytidine
  modified_base 26: mod_base = OTHER; note = 2'-O-methylguanosine
  modified_base 29: mod_base = OTHER; note = 2'-O-methyluridine
  modified_base 30: mod_base = OTHER; note = 2'-O-methyladenosine
  modified_base 44: mod_base = OTHER; note = 2'-O-methylcytidine
  modified_base 45: mod_base = OTHER; note = 2'-O-methyladenosine
  modified_base 49: mod_base = OTHER; note = 2'-O-methyluridine
  modified_base 50: mod_base = OTHER; note = 2'-O-methylguanosine
  modified_base 62: mod_base = OTHER; note = 2'-O-methyluridine
  modified_base 63: mod_base = OTHER; note = 2'-O-methyladenosine
  modified_base 67: mod_base = OTHER; note = 2'-O-methylcytidine
  modified_base 68: mod_base = OTHER; note = 2'-O-methyluridine
  modified_base 69: mod_base = OTHER; note = 2'-O-methylguanosine
  modified_base 72: mod_base = OTHER; note = 2'-O-methylcytidine
  modified_base 75: mod_base = OTHER; note = 2'-O-methyluridine
  modified_base 76: mod_base = OTHER; note = 2'-O-methylguanosine
  modified_base 79: mod_base = OTHER; note = 2'-O-methyluridine
  modified_base 82: mod_base = OTHER; note = 2'-O-methyluridine
  modified_base 83: mod_base = OTHER; note = 2'-O-methyladenosine
  modified_base 84: mod_base = OTHER; note = 2'-O-methylcytidine
  modified_base 109: mod_base = OTHER; note = 2'-O-methyluridine
  modified_base 113: mod_base = OTHER; note = 2'-O-methylcytidine
  modified_base 117: mod_base = OTHER; note = 2'-O-methyluridine
  modified_base 118: mod_base = OTHER; note = 2'-O-methyladenosine phosphorothioate
  modified_base 119: mod_base = OTHER; note = 2'-O-methyladenosine phosphorothioate
  modified_base 120: mod_base = OTHER; note = 2'-O-methyladenosine

SEQ ID NO: 363 - RNA, 120 nt, synthetic construct; identical to SEQ ID NO: 2
  source 1..120: mol_type = other RNA
  modified_base 1: mod_base = OTHER; note = 2'-O-methylguanosine phosphorothioate
  modified_base 2: mod_base = OTHER; note = 2'-O-methyluridine phosphorothioate
  modified_base 3: mod_base = OTHER; note = 2'-O-methyluridine
  modified_base 5: mod_base = OTHER; note = 2'-O-methyluridine
  modified_base 16: mod_base = OTHER; note = 2'-O-methylcytidine
  modified_base 21: mod_base = OTHER; note = 2'-O-methylcytidine
  modified_base 25: mod_base = OTHER; note = 2'-O-methylcytidine
  modified_base 26: mod_base = OTHER; note = 2'-O-methylguanosine
  modified_base 29: mod_base = OTHER; note = 2'-O-methyluridine
  modified_base 30: mod_base = OTHER; note = 2'-O-methyladenosine
  modified_base 33: mod_base = OTHER; note = 2'-O-methyluridine
  modified_base 35: mod_base = OTHER; note = 2'-O-methyluridine
  modified_base 37: mod_base = OTHER; note = 2'-O-methyladenosine
  modified_base 39: mod_base = OTHER; note = 2'-O-methyluridine
  modified_base 44: mod_base = OTHER; note = 2'-O-methylcytidine
  modified_base 45: mod_base = OTHER; note = 2'-O-methyladenosine
  modified_base 47: mod_base = OTHER; note = 2'-O-methylguanosine
  modified_base 49: mod_base = OTHER; note = 2'-O-methyluridine
  modified_base 50: mod_base = OTHER; note = 2'-O-methylguanosine
  modified_base 51: mod_base = OTHER; note = 2'-O-methyluridine
  modified_base 62: mod_base = OTHER; note = 2'-O-methyluridine
  modified_base 63: mod_base = OTHER; note = 2'-O-methyladenosine
  modified_base 65: mod_base = OTHER; note = 2'-O-methyluridine
  modified_base 67: mod_base = OTHER; note = 2'-O-methylcytidine
  modified_base 68: mod_base = OTHER; note = 2'-O-methyluridine
  modified_base 69: mod_base = OTHER; note = 2'-O-methylguanosine
  modified_base 72: mod_base = OTHER; note = 2'-O-methylcytidine
  modified_base 75: mod_base = OTHER; note = 2'-O-methyluridine
  modified_base 76: mod_base = OTHER; note = 2'-O-methylguanosine
  modified_base 79: mod_base = OTHER; note = 2'-O-methyluridine
  modified_base 82: mod_base = OTHER; note = 2'-O-methyluridine
  modified_base 83: mod_base = OTHER; note = 2'-O-methyladenosine
  modified_base 84: mod_base = OTHER; note = 2'-O-methylcytidine
  modified_base 86: mod_base = OTHER; note = 2'-O-methyladenosine
  modified_base 87: mod_base = OTHER; note = 2'-O-methylguanosine
  modified_base 89: mod_base = OTHER; note = 2'-O-methylcytidine
  modified_base 92: mod_base = OTHER; note = 2'-O-methyluridine
  modified_base 95: mod_base = OTHER; note = 2'-O-methylcytidine
  modified_base 109: mod_base = OTHER; note = 2'-O-methyluridine
  modified_base 113: mod_base = OTHER; note = 2'-O-methylcytidine
  modified_base 117: mod_base = OTHER; note = 2'-O-methyluridine
  modified_base 118: mod_base = OTHER; note = 2'-O-methyladenosine phosphorothioate
  modified_base 119: mod_base = OTHER; note = 2'-O-methyladenosine phosphorothioate
  modified_base 120: mod_base = OTHER; note = 2'-O-methyladenosine

SEQ ID NO: 364 - RNA, 120 nt, synthetic construct; identical to SEQ ID NO: 2
  source 1..120: mol_type = other RNA
  modified_base 1: mod_base = OTHER; note = 2'-O-methylguanosine phosphorothioate
  modified_base 2: mod_base = OTHER; note = 2'-O-methyluridine phosphorothioate
  modified_base 3: mod_base = OTHER; note = 2'-O-methyluridine
  modified_base 4: mod_base = OTHER; note = 2'-O-methylcytidine
  modified_base 5: mod_base = OTHER; note = 2'-O-methyluridine
  modified_base 6: mod_base = OTHER; note = 2'-O-methylguanosine
  modified_base 7: mod_base = OTHER; note = 2'-O-methyluridine
  modified_base 11: mod_base = OTHER; note = 2'-O-methyluridine
  modified_base 16: mod_base = OTHER; note = 2'-O-methylcytidine
  modified_base 17: mod_base = OTHER; note = 2'-O-methyladenosine
  modified_base 18: mod_base = OTHER; note = 2'-O-methylguanosine
  modified_base 19: mod_base = OTHER; note = 2'-O-methylguanosine
  modified_base 20: mod_base = OTHER; note = 2'-O-methyladenosine
  modified_base 21: mod_base = OTHER; note = 2'-O-methylcytidine
  modified_base 25: mod_base = OTHER; note = 2'-O-methylcytidine
  modified_base 26: mod_base = OTHER; note = 2'-O-methylguanosine
  modified_base 27: mod_base = OTHER; note = 2'-O-methyluridine
  modified_base 28: mod_base = OTHER; note = 2'-O-methylcytidine
  modified_base 29: mod_base = OTHER; note = 2'-O-methyluridine
  modified_base 30: mod_base = OTHER; note = 2'-O-methyladenosine
  modified_base 31: mod_base = OTHER; note = 2'-O-methylguanosine
  modified_base 39: mod_base = OTHER; note = 2'-O-methyluridine
  modified_base 42: mod_base = OTHER; note = 2'-O-methyluridine
  modified_base 45: mod_base = OTHER; note = 2'-O-methyladenosine
  modified_base 46: mod_base = OTHER; note = 2'-O-methylguanosine
  modified_base 47: mod_base = OTHER; note = 2'-O-methylguanosine
  modified_base 48: mod_base = OTHER; note = 2'-O-methylguanosine
  modified_base 49: mod_base = OTHER; note = 2'-O-methyluridine
  modified_base 50: mod_base = OTHER; note = 2'-O-methylguanosine
  modified_base 51: mod_base = OTHER; note = 2'-O-methyluridine
  modified_base 52: mod_base = OTHER; note = 2'-O-methylguanosine
  modified_base 57: mod_base = OTHER; note = 2'-O-methyladenosine
  modified_base 58: mod_base = OTHER; note = 2'-O-methylcytidine
  modified_base 59: mod_base = OTHER; note = 2'-O-methyluridine
  modified_base 60: mod_base = OTHER; note = 2'-O-methylcytidine
  modified_base 61: mod_base = OTHER; note = 2'-O-methylcytidine
  modified_base 62: mod_base = OTHER; note = 2'-O-methyluridine
  modified_base 64: mod_base = OTHER; note = 2'-O-methyluridine
  modified_base 65: mod_base = OTHER; note = 2'-O-methyluridine
  modified_base 70: mod_base = OTHER; note = 2'-O-methylguanosine
  modified_base 71: mod_base = OTHER; note = 2'-O-methyladenosine
  modified_base 72: mod_base = OTHER; note = 2'-O-methylcytidine
  modified_base 73: mod_base = OTHER; note = 2'-O-methylguanosine
  modified_base 74: mod_base = OTHER; note = 2'-O-methyladenosine
  modified_base 75: mod_base = OTHER; note = 2'-O-methyluridine
  modified_base 76: mod_base = OTHER; note = 2'-O-methylguanosine
  modified_base 77: mod_base = OTHER; note = 2'-O-methyluridine
  modified_base 78: mod_base = OTHER; note = 2'-O-methylcytidine
  modified_base 79: mod_base = OTHER; note = 2'-O-methyluridine
  modified_base 80: mod_base = OTHER; note = 2'-O-methylcytidine
  modified_base 81: mod_base = OTHER; note = 2'-O-methyluridine
  modified_base 82: mod_base = OTHER; note = 2'-O-methyluridine
  modified_base 83: mod_base = OTHER; note = 2'-O-methyladenosine
  modified_base 84: mod_base = OTHER; note = 2'-O-methylcytidine
  modified_base 85: mod_base = OTHER; note = 2'-O-methylguanosine
  modified_base 86: mod_base = OTHER; note = 2'-O-methyladenosine
  modified_base 87: mod_base = OTHER; note = 2'-O-methylguanosine
  modified_base 117: mod_base = OTHER; note = 2'-O-methyluridine
  modified_base 118: mod_base = OTHER; note = 2'-O-methyladenosine phosphorothioate
  modified_base 119: mod_base = OTHER; note = 2'-O-methyladenosine phosphorothioate
  modified_base 120: mod_base = OTHER; note = 2'-O-methyladenosine

SEQ ID NO: 365 - RNA, 120 nt, synthetic construct; identical to SEQ ID NO: 2
  source 1..120: mol_type = other RNA
  modified_base 1: mod_base = OTHER; note = 2'-O-methylguanosine phosphorothioate
  modified_base 2: mod_base = OTHER; note = 2'-O-methyluridine phosphorothioate
  modified_base 3: mod_base = OTHER; note = 2'-O-methyluridine
  modified_base 4: mod_base = OTHER; note = 2'-O-methylcytidine
  modified_base 5: mod_base = OTHER; note = 2'-O-methyluridine
  modified_base 6: mod_base = OTHER; note = 2'-O-methylguanosine
  modified_base 7: mod_base = OTHER; note = 2'-O-methyluridine
  modified_base 11: mod_base = OTHER; note = 2'-O-methyluridine
  modified_base 16: mod_base = OTHER; note = 2'-O-methylcytidine
  modified_base 17: mod_base = OTHER; note = 2'-O-methyladenosine
  modified_base 18: mod_base = OTHER; note = 2'-O-methylguanosine
  modified_base 19: mod_base = OTHER; note = 2'-O-methylguanosine
  modified_base 20: mod_base = OTHER; note = 2'-O-methyladenosine
  modified_base 21: mod_base = OTHER; note = 2'-O-methylcytidine
  modified_base 25: mod_base = OTHER; note = 2'-O-methylcytidine
  modified_base 26: mod_base = OTHER; note = 2'-O-methylguanosine
  modified_base 27: mod_base = OTHER; note = 2'-O-methyluridine
  modified_base 28: mod_base = OTHER; note = 2'-O-methylcytidine
  modified_base 29: mod_base = OTHER; note = 2'-O-methyluridine
  modified_base 30: mod_base = OTHER; note = 2'-O-methyladenosine
  modified_base 31: mod_base = OTHER; note = 2'-O-methylguanosine
  modified_base 45: mod_base = OTHER; note = 2'-O-methyladenosine
  modified_base 46: mod_base = OTHER; note = 2'-O-methylguanosine
  modified_base 47: mod_base = OTHER; note = 2'-O-methylguanosine
  modified_base 48: mod_base = OTHER; note = 2'-O-methylguanosine
  modified_base 49: mod_base = OTHER; note = 2'-O-methyluridine
  modified_base 50: mod_base = OTHER; note = 2'-O-methylguanosine
  modified_base 51: mod_base = OTHER; note = 2'-O-methyluridine
  modified_base 52: mod_base = OTHER; note = 2'-O-methylguanosine
  modified_base 57: mod_base = OTHER; note = 2'-O-methyladenosine
  modified_base 58: mod_base = OTHER; note = 2'-O-methylcytidine
  modified_base 59: mod_base = OTHER; note = 2'-O-methyluridine
  modified_base 60: mod_base = OTHER; note = 2'-O-methylcytidine
  modified_base 61: mod_base = OTHER; note = 2'-O-methylcytidine
  modified_base 62: mod_base = OTHER; note = 2'-O-methyluridine
  modified_base 64: mod_base = OTHER; note = 2'-O-methyluridine
  modified_base 65: mod_base = OTHER; note = 2'-O-methyluridine
  modified_base 70: mod_base = OTHER; note = 2'-O-methylguanosine
  modified_base 71: mod_base = OTHER; note = 2'-O-methyladenosine
  modified_base 72: mod_base = OTHER; note = 2'-O-methylcytidine
  modified_base 73: mod_base = OTHER; note = 2'-O-methylguanosine
  modified_base 74: mod_base = OTHER; note = 2'-O-methyladenosine
  modified_base 75: mod_base = OTHER; note = 2'-O-methyluridine
  modified_base 76: mod_base = OTHER; note = 2'-O-methylguanosine
  modified_base 77: mod_base = OTHER; note = 2'-O-methyluridine
  modified_base 78: mod_base = OTHER; note = 2'-O-methylcytidine
  modified_base 79: mod_base = OTHER; note = 2'-O-methyluridine
  modified_base 80: mod_base = OTHER; note = 2'-O-methylcytidine
  modified_base 81: mod_base = OTHER; note = 2'-O-methyluridine
  modified_base 82: mod_base = OTHER; note = 2'-O-methyluridine
  modified_base 83: mod_base = OTHER; note = 2'-O-methyladenosine
  modified_base 84: mod_base = OTHER; note = 2'-O-methylcytidine
  modified_base 85: mod_base = OTHER; note = 2'-O-methylguanosine
  modified_base 86: mod_base = OTHER; note = 2'-O-methyladenosine
  modified_base 87: mod_base = OTHER; note = 2'-O-methylguanosine
  modified_base 117: mod_base = OTHER; note = 2'-O-methyluridine
  modified_base 118: mod_base = OTHER; note = 2'-O-methyladenosine phosphorothioate
  modified_base 119: mod_base = OTHER; note = 2'-O-methyladenosine phosphorothioate
  modified_base 120: mod_base = OTHER; note = 2'-O-methyladenosine

SEQ ID NO: 366 - RNA, 120 nt, synthetic construct; identical to SEQ ID NO: 2
  source 1..120: mol_type = other RNA
  modified_base 1: mod_base = OTHER; note = 2'-O-methylguanosine phosphorothioate
  modified_base 2: mod_base = OTHER; note = 2'-O-methyluridine phosphorothioate
  modified_base 3: mod_base = OTHER; note = 2'-O-methyluridine
  modified_base 25: mod_base = OTHER; note = 2'-O-methylcytidine
  modified_base 26: mod_base = OTHER; note = 2'-O-methylguanosine
  modified_base 27: mod_base = OTHER; note = 2'-O-methyluridine
  modified_base 28: mod_base = OTHER; note = 2'-O-methylcytidine
  modified_base 29: mod_base = OTHER; note = 2'-O-methyluridine
  modified_base 30: mod_base = OTHER; note = 2'-O-methyladenosine
  modified_base 31: mod_base = OTHER; note = 2'-O-methylguanosine
  modified_base 39: mod_base = OTHER; note = 2'-O-methyluridine
  modified_base 42: mod_base = OTHER; note = 2'-O-methyluridine
  modified_base 45: mod_base = OTHER; note = 2'-O-methyladenosine
  modified_base 46: mod_base = OTHER; note = 2'-O-methylguanosine
  modified_base 47: mod_base = OTHER; note = 2'-O-methylguanosine
  modified_base 48: mod_base = OTHER; note = 2'-O-methylguanosine
  modified_base 49: mod_base = OTHER; note = 2'-O-methyluridine
  modified_base 50: mod_base = OTHER; note = 2'-O-methylguanosine
  modified_base 51: mod_base = OTHER; note = 2'-O-methyluridine
  modified_base 52: mod_base = OTHER; note = 2'-O-methylguanosine
  modified_base 57: mod_base = OTHER; note = 2'-O-methyladenosine
  modified_base 58: mod_base = OTHER; note = 2'-O-methylcytidine
  modified_base 59: mod_base = OTHER; note = 2'-O-methyluridine
  modified_base 60: mod_base = OTHER; note = 2'-O-methylcytidine
  modified_base 61: mod_base = OTHER; note = 2'-O-methylcytidine
  modified_base 62: mod_base = OTHER; note = 2'-O-methyluridine
  modified_base 64: mod_base = OTHER; note = 2'-O-methyluridine
  modified_base 65: mod_base = OTHER; note = 2'-O-methyluridine
  modified_base 70: mod_base = OTHER; note = 2'-O-methylguanosine
  modified_base 71: mod_base = OTHER; note = 2'-O-methyladenosine
  modified_base 72: mod_base = OTHER; note = 2'-O-methylcytidine
  modified_base 73: mod_base = OTHER; note = 2'-O-methylguanosine
  modified_base 74: mod_base = OTHER; note = 2'-O-methyladenosine
  modified_base 75: mod_base = OTHER; note = 2'-O-methyluridine
  modified_base 76: mod_base = OTHER; note = 2'-O-methylguanosine
  modified_base 77: mod_base = OTHER; note = 2'-O-methyluridine
  modified_base 78: mod_base = OTHER; note = 2'-O-methylcytidine
  modified_base 79: mod_base = OTHER; note = 2'-O-methyluridine
  modified_base 80: mod_base = OTHER; note = 2'-O-methylcytidine
  modified_base 81: mod_base = OTHER; note = 2'-O-methyluridine
  modified_base 82: mod_base = OTHER; note = 2'-O-methyluridine
  modified_base 83: mod_base = OTHER; note = 2'-O-methyladenosine
  modified_base 84: mod_base = OTHER; note = 2'-O-methylcytidine
  modified_base 85: mod_base = OTHER; note = 2'-O-methylguanosine
  modified_base 86: mod_base = OTHER; note = 2'-O-methyladenosine
  modified_base 87: mod_base = OTHER; note = 2'-O-methylguanosine
  modified_base 117: mod_base = OTHER; note = 2'-O-methyluridine
  modified_base 118: mod_base = OTHER; note = 2'-O-methyladenosine phosphorothioate
  modified_base 119: mod_base = OTHER; note = 2'-O-methyladenosine phosphorothioate
  modified_base 120: mod_base = OTHER; note = 2'-O-methyladenosine

SEQ ID NO: 367 - RNA, 120 nt, synthetic construct; identical to SEQ ID NO: 2
  source 1..120: mol_type = other RNA
  modified_base 1: mod_base = OTHER; note = 2'-O-methylguanosine phosphorothioate
  modified_base 2: mod_base = OTHER; note = 2'-O-methyluridine phosphorothioate
  modified_base 3: mod_base = OTHER; note = 2'-O-methyluridine
  modified_base 4: mod_base = OTHER; note = 2'-O-methylcytidine
  modified_base 5: mod_base = OTHER; note = 2'-O-methyluridine
  modified_base 6: mod_base = OTHER; note = 2'-O-methylguanosine
  modified_base 7: mod_base = OTHER; note = 2'-O-methyluridine
  modified_base 11: mod_base = OTHER; note = 2'-O-methyluridine
  modified_base 16: mod_base = OTHER; note = 2'-O-methylcytidine
  modified_base 17: mod_base = OTHER; note = 2'-O-methyladenosine
  modified_base 18: mod_base = OTHER; note = 2'-O-methylguanosine
  modified_base 19: mod_base = OTHER; note = 2'-O-methylguanosine
  modified_base 20: mod_base = OTHER; note = 2'-O-methyladenosine
  modified_base 21: mod_base = OTHER; note = 2'-O-methylcytidine
  modified_base 25: mod_base = OTHER; note = 2'-O-methylcytidine
  modified_base 26: mod_base = OTHER; note = 2'-O-methylguanosine
  modified_base 27: mod_base = OTHER; note = 2'-O-methyluridine
  modified_base 28: mod_base = OTHER; note = 2'-O-methylcytidine
  modified_base 29: mod_base = OTHER; note = 2'-O-methyluridine
  modified_base 30: mod_base = OTHER; note = 2'-O-methyladenosine
  modified_base 31: mod_base = OTHER; note = 2'-O-methylguanosine
  modified_base 39: mod_base = OTHER; note = 2'-O-methyluridine
  modified_base 42: mod_base = OTHER; note = 2'-O-methyluridine
  modified_base 64: mod_base = OTHER; note = 2'-O-methyluridine
  modified_base 65: mod_base = OTHER; note = 2'-O-methyluridine
  modified_base 70: mod_base = OTHER; note = 2'-O-methylguanosine
  modified_base 71: mod_base = OTHER; note = 2'-O-methyladenosine
  modified_base 72: mod_base = OTHER; note = 2'-O-methylcytidine
  modified_base 73: mod_base = OTHER; note = 2'-O-methylguanosine
  modified_base 74: mod_base = OTHER; note = 2'-O-methyladenosine
  modified_base 75: mod_base = OTHER; note = 2'-O-methyluridine
  modified_base 76: mod_base = OTHER; note = 2'-O-methylguanosine
  modified_base 77: mod_base = OTHER; note = 2'-O-methyluridine
  modified_base 78: mod_base = OTHER; note = 2'-O-methylcytidine
  modified_base 79: mod_base = OTHER; note = 2'-O-methyluridine
  modified_base 80: mod_base = OTHER; note = 2'-O-methylcytidine
  modified_base 81: mod_base = OTHER; note = 2'-O-methyluridine
  modified_base 82: mod_base = OTHER; note = 2'-O-methyluridine
  modified_base 83: mod_base = OTHER; note = 2'-O-methyladenosine
  modified_base 84: mod_base = OTHER; note = 2'-O-methylcytidine
  modified_base 85: mod_base = OTHER; note = 2'-O-methylguanosine
  modified_base 86: mod_base = OTHER; note = 2'-O-methyladenosine
  modified_base 87: mod_base = OTHER; note = 2'-O-methylguanosine
  modified_base 117: mod_base = OTHER; note = 2'-O-methyluridine
  modified_base 118: mod_base = OTHER; note = 2'-O-methyladenosine phosphorothioate
  modified_base 119: mod_base = OTHER; note = 2'-O-methyladenosine phosphorothioate
  modified_base 120: mod_base = OTHER; note = 2'-O-methyladenosine

SEQ ID NO: 368 - RNA, 120 nt, synthetic construct; identical to SEQ ID NO: 2
  source 1..120: mol_type = other RNA
  modified_base 1: mod_base = OTHER; note = 2'-O-methylguanosine phosphorothioate
  modified_base 2: mod_base = OTHER; note = 2'-O-methyluridine phosphorothioate
  modified_base 3: mod_base = OTHER; note = 2'-O-methyluridine
  modified_base 98: mod_base = OTHER; note = 2'-O-methyladenosine
  modified_base 104: mod_base = OTHER; note = 2'-O-methylcytidine
  modified_base 105: mod_base = OTHER; note = 2'-O-methyladenosine
  modified_base 109: mod_base = OTHER; note = 2'-O-methyluridine
  modified_base 110: mod_base = OTHER; note = 2'-O-methyladenosine
  modified_base 117: mod_base = OTHER; note = 2'-O-methyluridine
  modified_base 118: mod_base = OTHER; note = 2'-O-methyladenosine phosphorothioate
  modified_base 119: mod_base = OTHER; note = 2'-O-methyladenosine phosphorothioate
  modified_base 120: mod_base = OTHER; note = 2'-O-methyladenosine

SEQ ID NO: 369 - RNA, 120 nt, synthetic construct; identical to SEQ ID NO: 2
  source 1..120: mol_type = other RNA
  modified_base 1: mod_base = OTHER; note = 2'-O-methylguanosine phosphorothioate
  modified_base 2: mod_base = OTHER; note = 2'-O-methyluridine phosphorothioate
  modified_base 3: mod_base = OTHER; note = 2'-O-methyluridine
  modified_base 4: mod_base = OTHER; note = 2'-O-methylcytidine
  modified_base 5: mod_base = OTHER; note = 2'-O-methyluridine
  modified_base 6: mod_base = OTHER; note = 2'-O-methylguanosine
  modified_base 7: mod_base = OTHER; note = 2'-O-methyluridine
  modified_base 11: mod_base = OTHER; note = 2'-O-methyluridine
  modified_base 16: mod_base = OTHER; note = 2'-O-methylcytidine
  modified_base 17: mod_base = OTHER; note = 2'-O-methyladenosine
  modified_base 18: mod_base = OTHER; note = 2'-O-methylguanosine
  modified_base 19: mod_base = OTHER; note = 2'-O-methylguanosine
  modified_base 20: mod_base = OTHER; note = 2'-O-methyladenosine
  modified_base 21: mod_base = OTHER; note = 2'-O-methylcytidine
  modified_base 25: mod_base = OTHER; note = 2'-O-methylcytidine
  modified_base 26: mod_base = OTHER; note = 2'-O-methylguanosine
  modified_base 27: mod_base = OTHER; note = 2'-O-methyluridine
  modified_base 28: mod_base = OTHER; note = 2'-O-methylcytidine
  modified_base 29: mod_base = OTHER; note = 2'-O-methyluridine
  modified_base 30: mod_base = OTHER; note = 2'-O-methyladenosine
  modified_base 31: mod_base = OTHER; note = 2'-O-methylguanosine
  modified_base 39: mod_base = OTHER; note = 2'-O-methyluridine
  modified_base 42: mod_base = OTHER; note = 2'-O-methyluridine
  modified_base 45: mod_base = OTHER; note = 2'-O-methyladenosine
  modified_base 46: mod_base = OTHER; note = 2'-O-methylguanosine
  modified_base 47: mod_base = OTHER; note = 2'-O-methylguanosine
  modified_base 48: mod_base = OTHER; note = 2'-O-methylguanosine
  modified_base 49: mod_base = OTHER; note = 2'-O-methyluridine
  modified_base 50: mod_base = OTHER; note = 2'-O-methylguanosine
  modified_base 51: mod_base = OTHER; note = 2'-O-methyluridine
  modified_base 52: mod_base = OTHER; note = 2'-O-methylguanosine
  modified_base 57: mod_base = OTHER; note = 2'-O-methyladenosine
  modified_base 58: mod_base = OTHER; note = 2'-O-methylcytidine
  modified_base 59: mod_base = OTHER; note = 2'-O-methyluridine
  modified_base 60: mod_base = OTHER; note = 2'-O-methylcytidine
  modified_base 61: mod_base = OTHER; note = 2'-O-methylcytidine
  modified_base 62: mod_base = OTHER; note = 2'-O-methyluridine
  modified_base 64: mod_base = OTHER; note = 2'-O-methyluridine
  modified_base 65: mod_base = OTHER; note = 2'-O-methyluridine
  modified_base 70: mod_base = OTHER; note = 2'-O-methylguanosine
  modified_base 71: mod_base = OTHER; note = 2'-O-methyladenosine
  modified_base 72: mod_base = OTHER; note = 2'-O-methylcytidine
  modified_base 73: mod_base = OTHER; note = 2'-O-methylguanosine
  modified_base 74: mod_base = OTHER; note = 2'-O-methyladenosine
  modified_base 75: mod_base = OTHER; note = 2'-O-methyluridine
  modified_base 76: mod_base = OTHER; note = 2'-O-methylguanosine
  modified_base 77: mod_base = OTHER; note = 2'-O-methyluridine
  modified_base 78: mod_base = OTHER; note = 2'-O-methylcytidine
  modified_base 79: mod_base = OTHER; note = 2'-O-methyluridine
  modified_base 80: mod_base = OTHER; note = 2'-O-methylcytidine
  modified_base 81: mod_base = OTHER; note = 2'-O-methyluridine
  modified_base 82: mod_base = OTHER; note = 2'-O-methyluridine
  modified_base 83: mod_base = OTHER; note = 2'-O-methyladenosine
  modified_base 84: mod_base = OTHER; note = 2'-O-methylcytidine
  modified_base 85: mod_base = OTHER; note = 2'-O-methylguanosine
  modified_base 86: mod_base = OTHER; note = 2'-O-methyladenosine
  modified_base 87: mod_base = OTHER; note = 2'-O-methylguanosine
  modified_base 98: mod_base = OTHER; note = 2'-O-methyladenosine
  modified_base 104: mod_base = OTHER; note = 2'-O-methylcytidine
  modified_base 105: mod_base = OTHER; note = 2'-O-methyladenosine
  modified_base 109: mod_base = OTHER; note = 2'-O-methyluridine
  modified_base 110: mod_base = OTHER; note = 2'-O-methyladenosine
  modified_base 117: mod_base = OTHER; note = 2'-O-methyluridine
  modified_base 118: mod_base = OTHER; note = 2'-O-methyladenosine phosphorothioate
  modified_base 119: mod_base = OTHER; note = 2'-O-methyladenosine phosphorothioate
  modified_base 120: mod_base = OTHER; note = 2'-O-methyladenosine

SEQ ID NO: 370 - RNA, 120 nt, synthetic construct; identical to SEQ ID NO: 2
  source 1..120: mol_type = other RNA
  modified_base 1: mod_base = OTHER; note = 2'-O-methylguanosine phosphorothioate
  modified_base 2: mod_base = OTHER; note = 2'-O-methyluridine phosphorothioate
  modified_base 3: mod_base = OTHER; note = 2'-O-methyluridine
  modified_base 98: mod_base = OTHER; note = 2'-O-methyladenosine
  modified_base 101: mod_base = OTHER; note = 2'-O-methylcytidine
  modified_base 104: mod_base = OTHER; note = 2'-O-methylcytidine
  modified_base 105: mod_base = OTHER; note = 2'-O-methyladenosine
  modified_base 107: mod_base = OTHER; note = 2'-O-methylcytidine
  modified_base 109: mod_base = OTHER; note = 2'-O-methyluridine
  modified_base 110: mod_base = OTHER; note = 2'-O-methyladenosine
  modified_base 117: mod_base = OTHER; note = 2'-O-methyluridine
  modified_base 118: mod_base = OTHER; note = 2'-O-methyladenosine phosphorothioate
  modified_base 119: mod_base = OTHER; note = 2'-O-methyladenosine phosphorothioate
  modified_base 120: mod_base = OTHER; note = 2'-O-methyladenosine

SEQ ID NO: 371 - RNA, 120 nt, synthetic construct; identical to SEQ ID NO: 2
  source 1..120: mol_type = other RNA
  modified_base 1: mod_base = OTHER; note = 2'-O-methylguanosine phosphorothioate
  modified_base 2: mod_base = OTHER; note = 2'-O-methyluridine phosphorothioate
  modified_base 3: mod_base = OTHER; note = 2'-O-methyluridine
  modified_base 4: mod_base = OTHER; note = 2'-O-methylcytidine
  modified_base 5: mod_base = OTHER; note = 2'-O-methyluridine
  modified_base 6: mod_base = OTHER; note = 2'-O-methylguanosine
  modified_base 7: mod_base = OTHER; note = 2'-O-methyluridine
  modified_base 11: mod_base = OTHER; note = 2'-O-methyluridine
  modified_base 16: mod_base = OTHER; note = 2'-O-methylcytidine
  modified_base 17: mod_base = OTHER; note = 2'-O-methyladenosine
  modified_base 18: mod_base = OTHER; note = 2'-O-methylguanosine
  modified_base 19: mod_base = OTHER; note = 2'-O-methylguanosine
  modified_base 20: mod_base = OTHER; note = 2'-O-methyladenosine
  modified_base 21: mod_base = OTHER; note = 2'-O-methylcytidine
  modified_base 25: mod_base = OTHER; note = 2'-O-methylcytidine
  modified_base 26: mod_base = OTHER; note = 2'-O-methylguanosine
  modified_base 27: mod_base = OTHER; note = 2'-O-methyluridine
  modified_base 28: mod_base = OTHER; note = 2'-O-methylcytidine
  modified_base 29: mod_base = OTHER; note = 2'-O-methyluridine
  modified_base 30: mod_base = OTHER; note = 2'-O-methyladenosine
  modified_base 31: mod_base = OTHER; note = 2'-O-methylguanosine
  modified_base 33: mod_base = OTHER; note = 2'-O-methyluridine
  modified_base 39: mod_base = OTHER; note = 2'-O-methyluridine
  modified_base 42: mod_base = OTHER; note = 2'-O-methyluridine
  modified_base 45: mod_base = OTHER; note = 2'-O-methyladenosine
  modified_base 46: mod_base = OTHER; note = 2'-O-methylguanosine
  modified_base 47: mod_base = OTHER; note = 2'-O-methylguanosine
  modified_base 48: mod_base = OTHER; note = 2'-O-methylguanosine
  modified_base 49: mod_base = OTHER; note = 2'-O-methyluridine
  modified_base 50: mod_base = OTHER; note = 2'-O-methylguanosine
  modified_base 51: mod_base = OTHER; note = 2'-O-methyluridine
  modified_base 52: mod_base = OTHER; note = 2'-O-methylguanosine
  modified_base 57: mod_base = OTHER; note = 2'-O-methyladenosine
  modified_base 58: mod_base = OTHER; note = 2'-O-methylcytidine
  modified_base 59: mod_base = OTHER; note = 2'-O-methyluridine
  modified_base 60: mod_base = OTHER; note = 2'-O-methylcytidine
  modified_base 61: mod_base = OTHER; note = 2'-O-methylcytidine
  modified_base 62: mod_base = OTHER; note = 2'-O-methyluridine
  modified_base 64: mod_base = OTHER; note = 2'-O-methyluridine
  modified_base 65: mod_base = OTHER; note = 2'-O-methyluridine
  modified_base 70: mod_base = OTHER; note = 2'-O-methylguanosine
  modified_base 71: mod_base = OTHER; note = 2'-O-methyladenosine
  modified_base 72: mod_base = OTHER; note = 2'-O-methylcytidine
  modified_base 73: mod_base = OTHER; note = 2'-O-methylguanosine
  modified_base 74: mod_base = OTHER; note = 2'-O-methyladenosine
  modified_base 75: mod_base = OTHER; note = 2'-O-methyluridine
  modified_base 76: mod_base = OTHER; note = 2'-O-methylguanosine
  modified_base 77: mod_base = OTHER; note = 2'-O-methyluridine
  modified_base 78: mod_base = OTHER; note = 2'-O-methylcytidine
  modified_base 79: mod_base = OTHER; note = 2'-O-methyluridine
  modified_base 80: mod_base = OTHER; note = 2'-O-methylcytidine
  modified_base 81: mod_base = OTHER; note = 2'-O-methyluridine
  modified_base 82: mod_base = OTHER; note = 2'-O-methyluridine
  modified_base 83: mod_base = OTHER; note = 2'-O-methyladenosine
  modified_base 84: mod_base = OTHER; note = 2'-O-methylcytidine
  modified_base 85: mod_base = OTHER; note = 2'-O-methylguanosine
  modified_base 86: mod_base = OTHER; note = 2'-O-methyladenosine
  modified_base 87: mod_base = OTHER; note = 2'-O-methylguanosine
  modified_base 89: mod_base = OTHER; note = 2'-O-methylcytidine
  modified_base 98: mod_base = OTHER; note = 2'-O-methyladenosine
  modified_base 101: mod_base = OTHER; note = 2'-O-methylcytidine
  modified_base 104: mod_base = OTHER; note = 2'-O-methylcytidine
  modified_base 105: mod_base = OTHER; note = 2'-O-methyladenosine
  modified_base 107: mod_base = OTHER; note = 2'-O-methylcytidine
  modified_base 109: mod_base = OTHER; note = 2'-O-methyluridine
  modified_base 110: mod_base = OTHER; note = 2'-O-methyladenosine
  modified_base 117: mod_base = OTHER; note = 2'-O-methyluridine
  modified_base 118: mod_base = OTHER; note = 2'-O-methyladenosine phosphorothioate
  modified_base 119: mod_base = OTHER; note = 2'-O-methyladenosine phosphorothioate
  modified_base 120: mod_base = OTHER; note = 2'-O-methyladenosine

SEQ ID NO: 372 - RNA, 120 nt, synthetic construct; identical to SEQ ID NO: 5
  source 1..120: mol_type = other RNA
  modified_base 1: mod_base = OTHER; note = 2'-O-methylguanosine phosphorothioate
  modified_base 2: mod_base = OTHER; note = 2'-O-methyluridine phosphorothioate
  modified_base 98: mod_base = OTHER; note = 2'-O-methyladenosine
  modified_base 101: mod_base = OTHER; note = 2'-O-methyluridine
  modified_base 104: mod_base = OTHER; note = 2'-O-methyluridine
  modified_base 105: mod_base = OTHER; note = 2'-O-methylcytidine
  modified_base 108: mod_base = OTHER; note = 2'-O-methyluridine
  modified_base 109: mod_base = OTHER; note = 2'-O-methylguanosine
  modified_base 110: mod_base = OTHER; note = 2'-O-methylguanosine
  modified_base 115: mod_base = OTHER; note = 2'-O-methyluridine
  modified_base 117: mod_base = OTHER; note = 2'-O-methyladenosine
  modified_base 118: mod_base = OTHER; note = 2'-O-methyluridine phosphorothioate
  modified_base 119: mod_base = OTHER; note = 2'-O-methyluridine phosphorothioate
  modified_base 120: mod_base = OTHER; note = 2'-O-methylcytidine

SEQ ID NO: 373 - RNA, 120 nt, synthetic construct; identical to SEQ ID NO: 5
  source 1..120: mol_type = other RNA
  modified_base 1: mod_base = OTHER; note = 2'-O-methylguanosine phosphorothioate
  modified_base 2: mod_base = OTHER; note = 2'-O-methyluridine phosphorothioate
  modified_base 104: mod_base = OTHER; note = 2'-O-methyluridine
  modified_base 105: mod_base = OTHER; note = 2'-O-methylcytidine
  modified_base 109: mod_base = OTHER; note = 2'-O-methylguanosine
  modified_base 110: mod_base = OTHER; note = 2'-O-methylguanosine
  modified_base 117: mod_base = OTHER; note = 2'-O-methyladenosine
  modified_base 118: mod_base = OTHER; note = 2'-O-methyluridine phosphorothioate
  modified_base 119: mod_base = OTHER; note = 2'-O-methyluridine phosphorothioate
  modified_base 120: mod_base = OTHER; note = 2'-O-methylcytidine

SEQ ID NO: 374 - RNA, 120 nt, synthetic construct; identical to SEQ ID NO: 5
  source 1..120: mol_type = other RNA
  modified_base 1: mod_base = OTHER; note = 2'-O-methylguanosine phosphorothioate
  modified_base 2: mod_base = OTHER; note = 2'-O-methyluridine phosphorothioate
  modified_base 5: mod_base = OTHER; note = 2'-O-methyluridine
  modified_base 16: mod_base = OTHER; note = 2'-O-methylcytidine
  modified_base 21: mod_base = OTHER; note = 2'-O-methylcytidine
  modified_base 25: mod_base = OTHER; note = 2'-O-methylcytidine
  modified_base 26: mod_base = OTHER; note = 2'-O-methylguanosine
  modified_base 29: mod_base = OTHER; note = 2'-O-methyluridine
  modified_base 30: mod_base = OTHER; note = 2'-O-methyladenosine
  modified_base 44: mod_base = OTHER; note = 2'-O-methylcytidine
  modified_base 45: mod_base = OTHER; note = 2'-O-methyladenosine
  modified_base 49: mod_base = OTHER; note = 2'-O-methyluridine
  modified_base 50: mod_base = OTHER; note = 2'-O-methylguanosine
  modified_base 62: mod_base = OTHER; note = 2'-O-methyluridine
  modified_base 63: mod_base = OTHER; note = 2'-O-methyladenosine
  modified_base 67: mod_base = OTHER; note = 2'-O-methylcytidine
  modified_base 68: mod_base = OTHER; note = 2'-O-methyluridine
  modified_base 69: mod_base = OTHER; note = 2'-O-methylguanosine
  modified_base 72: mod_base = OTHER; note = 2'-O-methylcytidine
  modified_base 75: mod_base = OTHER; note = 2'-O-methyluridine
  modified_base 76: mod_base = OTHER; note = 2'-O-methylguanosine
  modified_base 79: mod_base = OTHER; note = 2'-O-methyluridine
  modified_base 82: mod_base = OTHER; note = 2'-O-methyluridine
  modified_base 83: mod_base = OTHER; note = 2'-O-methyladenosine
  modified_base 84: mod_base = OTHER; note = 2'-O-methylcytidine
  modified_base 117: mod_base = OTHER; note = 2'-O-methyladenosine
  modified_base 118: mod_base = OTHER; note = 2'-O-methyluridine phosphorothioate
  modified_base 119: mod_base = OTHER; note = 2'-O-methyluridine phosphorothioate
  modified_base 120: mod_base = OTHER; note = 2'-O-methylcytidine

SEQ ID NO: 375 - RNA, 120 nt, synthetic construct; identical to SEQ ID NO: 5
  source 1..120: mol_type = other RNA
  modified_base 1: mod_base = OTHER; note = 2'-O-methylguanosine phosphorothioate
  modified_base 2: mod_base = OTHER; note = 2'-O-methyluridine phosphorothioate
  modified_base 5: mod_base = OTHER; note = 2'-O-methyluridine
  modified_base 16: mod_base = OTHER; note = 2'-O-methylcytidine
  modified_base 21: mod_base = OTHER; note = 2'-O-methylcytidine
  modified_base 25: mod_base = OTHER; note = 2'-O-methylcytidine
  modified_base 26: mod_base = OTHER; note = 2'-O-methylguanosine
  modified_base 29: mod_base = OTHER; note = 2'-O-methyluridine
  modified_base 30: mod_base = OTHER; note = 2'-O-methyladenosine
  modified_base 33: mod_base = OTHER; note = 2'-O-methyluridine
  modified_base 35: mod_base = OTHER; note = 2'-O-methyluridine
  modified_base 37: mod_base = OTHER; note = 2'-O-methyladenosine
  modified_base 39: mod_base = OTHER; note = 2'-O-methyluridine
  modified_base 44: mod_base = OTHER; note = 2'-O-methylcytidine
  modified_base 45: mod_base = OTHER; note = 2'-O-methyladenosine
  modified_base 47: mod_base = OTHER; note = 2'-O-methylguanosine
  modified_base 49: mod_base = OTHER; note = 2'-O-methyluridine
  modified_base 50: mod_base = OTHER; note = 2'-O-methylguanosine
  modified_base 51: mod_base = OTHER; note = 2'-O-methyluridine
  modified_base 62: mod_base = OTHER; note = 2'-O-methyluridine
  modified_base 63: mod_base = OTHER; note = 2'-O-methyladenosine
  modified_base 65: mod_base = OTHER; note = 2'-O-methyluridine
  modified_base 67: mod_base = OTHER; note = 2'-O-methylcytidine
  modified_base 68: mod_base = OTHER; note = 2'-O-methyluridine
  modified_base 69: mod_base = OTHER; note = 2'-O-methylguanosine
  modified_base 72: mod_base = OTHER; note = 2'-O-methylcytidine
  modified_base 75: mod_base = OTHER; note = 2'-O-methyluridine
  modified_base 76: mod_base = OTHER; note = 2'-O-methylguanosine
  modified_base 79: mod_base = OTHER; note = 2'-O-methyluridine
  modified_base 82: mod_base = OTHER; note = 2'-O-methyluridine
  modified_base 83: mod_base = OTHER; note = 2'-O-methyladenosine
  modified_base 84: mod_base = OTHER; note = 2'-O-methylcytidine
  modified_base 86: mod_base = OTHER; note = 2'-O-methyladenosine
  modified_base 87: mod_base = OTHER; note = 2'-O-methylguanosine
  modified_base 89: mod_base = OTHER; note = 2'-O-methylcytidine
  modified_base 92: mod_base = OTHER; note = 2'-O-methyluridine
  modified_base 95: mod_base = OTHER; note = 2'-O-methylcytidine
  modified_base 117: mod_base = OTHER; note = 2'-O-methyladenosine
  modified_base 118: mod_base = OTHER; note = 2'-O-methyluridine phosphorothioate
  modified_base 119: mod_base = OTHER; note = 2'-O-methyluridine phosphorothioate
  modified_base 120: mod_base = OTHER; note = 2'-O-methylcytidine

SEQ ID NO: 376 - RNA, 120 nt, synthetic construct; identical to SEQ ID NO: 5
  source 1..120: mol_type = other RNA
  modified_base 1: mod_base = OTHER; note = 2'-O-methylguanosine phosphorothioate
  modified_base 2: mod_base = OTHER; note = 2'-O-methyluridine phosphorothioate
  modified_base 4: mod_base = OTHER; note = 2'-O-methylcytidine
  modified_base 5: mod_base = OTHER; note = 2'-O-methyluridine
  modified_base 6: mod_base = OTHER; note = 2'-O-methylguanosine
  modified_base 7: mod_base = OTHER; note = 2'-O-methyluridine
  modified_base 11: mod_base = OTHER; note = 2'-O-methyluridine
  modified_base 16: mod_base = OTHER; note = 2'-O-methylcytidine
  modified_base 17: mod_base = OTHER; note = 2'-O-methyladenosine
  modified_base 18: mod_base = OTHER; note = 2'-O-methylguanosine
  modified_base 19: mod_base = OTHER; note = 2'-O-methylguanosine
  modified_base 20: mod_base = OTHER; note = 2'-O-methyladenosine
  modified_base 21: mod_base = OTHER; note = 2'-O-methylcytidine
  modified_base 25: mod_base = OTHER; note = 2'-O-methylcytidine
  modified_base 26: mod_base = OTHER; note = 2'-O-methylguanosine
  modified_base 27: mod_base = OTHER; note = 2'-O-methyluridine
  modified_base 28: mod_base = OTHER; note = 2'-O-methylcytidine
  modified_base 29: mod_base = OTHER; note = 2'-O-methyluridine
  modified_base 30: mod_base = OTHER; note = 2'-O-methyladenosine
  modified_base 31: mod_base = OTHER; note = 2'-O-methylguanosine
  modified_base 39: mod_base = OTHER; note = 2'-O-methyluridine
  modified_base 42: mod_base = OTHER; note = 2'-O-methyluridine
  modified_base 45: mod_base = OTHER; note = 2'-O-methyladenosine
  modified_base 46: mod_base = OTHER; note = 2'-O-methylguanosine
  modified_base 47: mod_base = OTHER; note = 2'-O-methylguanosine
  modified_base 48: mod_base = OTHER; note = 2'-O-methylguanosine
  modified_base 49: mod_base = OTHER; note = 2'-O-methyluridine
  modified_base 50: mod_base = OTHER; note = 2'-O-methylguanosine
  modified_base 51: mod_base = OTHER; note = 2'-O-methyluridine
  modified_base 52: mod_base = OTHER; note = 2'-O-methylguanosine
  modified_base 57: mod_base = OTHER; note = 2'-O-methyladenosine
  modified_base 58: mod_base = OTHER; note = 2'-O-methylcytidine
  modified_base 59: mod_base = OTHER; note = 2'-O-methyluridine
  modified_base 60: mod_base = OTHER; note = 2'-O-methylcytidine
  modified_base 61: mod_base = OTHER; note = 2'-O-methylcytidine
  modified_base 62: mod_base = OTHER; note = 2'-O-methyluridine
  modified_base 64: mod_base = OTHER; note = 2'-O-methyluridine
  modified_base 65: mod_base = OTHER; note = 2'-O-methyluridine
  modified_base 70: mod_base = OTHER; note = 2'-O-methylguanosine
  modified_base 71: mod_base = OTHER; note = 2'-O-methyladenosine
  modified_base 72: mod_base = OTHER; note = 2'-O-methylcytidine
  modified_base 73: mod_base = OTHER; note = 2'-O-methylguanosine
  modified_base 74: mod_base = OTHER; note = 2'-O-methyladenosine
  modified_base 75: mod_base = OTHER; note = 2'-O-methyluridine
  modified_base 76: mod_base = OTHER; note = 2'-O-methylguanosine
  modified_base 77: mod_base = OTHER; note = 2'-O-methyluridine
  modified_base 78: mod_base = OTHER; note = 2'-O-methylcytidine
  modified_base 79: mod_base = OTHER; note = 2'-O-methyluridine
  modified_base 80: mod_base = OTHER; note = 2'-O-methylcytidine
  modified_base 81: mod_base = OTHER; note = 2'-O-methyluridine
  modified_base 82: mod_base = OTHER; note = 2'-O-methyluridine
  modified_base 83: mod_base = OTHER; note = 2'-O-methyladenosine
  modified_base 84: mod_base = OTHER; note = 2'-O-methylcytidine
  modified_base 85: mod_base = OTHER; note = 2'-O-methylguanosine
  modified_base 86: mod_base = OTHER; note = 2'-O-methyladenosine
  modified_base 87: mod_base = OTHER; note = 2'-O-methylguanosine
  modified_base 117: mod_base = OTHER; note = 2'-O-methyladenosine
  modified_base 118: mod_base = OTHER; note = 2'-O-methyluridine phosphorothioate
  modified_base 119: mod_base = OTHER; note = 2'-O-methyluridine phosphorothioate
  modified_base 120: mod_base = OTHER; note = 2'-O-methylcytidine

SEQ ID NO: 377 - RNA, 120 nt, synthetic construct; identical to SEQ ID NO: 5
  source 1..120: mol_type = other RNA
  modified_base 1: mod_base = OTHER; note = 2'-O-methylguanosine phosphorothioate
  modified_base 2: mod_base = OTHER; note = 2'-O-methyluridine phosphorothioate
  modified_base 4: mod_base = OTHER; note = 2'-O-methylcytidine
  modified_base 5: mod_base = OTHER; note = 2'-O-methyluridine
  modified_base 6: mod_base = OTHER; note = 2'-O-methylguanosine
  modified_base 7: mod_base = OTHER; note = 2'-O-methyluridine
  modified_base 11: mod_base = OTHER; note = 2'-O-methyluridine
  modified_base 16: mod_base = OTHER; note = 2'-O-methylcytidine
  modified_base 17: mod_base = OTHER; note = 2'-O-methyladenosine
  modified_base 18: mod_base = OTHER; note = 2'-O-methylguanosine
  modified_base 19: mod_base = OTHER; note = 2'-O-methylguanosine
  modified_base 20: mod_base = OTHER; note = 2'-O-methyladenosine
  modified_base 21: mod_base = OTHER; note = 2'-O-methylcytidine
  modified_base 25: mod_base = OTHER; note = 2'-O-methylcytidine
  modified_base 26: mod_base = OTHER; note = 2'-O-methylguanosine
  modified_base 27: mod_base = OTHER; note = 2'-O-methyluridine
  modified_base 28: mod_base = OTHER; note = 2'-O-methylcytidine
  modified_base 29: mod_base = OTHER; note = 2'-O-methyluridine
  modified_base 30: mod_base = OTHER; note = 2'-O-methyladenosine
  modified_base 31: mod_base = OTHER; note = 2'-O-methylguanosine
  modified_base 45: mod_base = OTHER; note = 2'-O-methyladenosine
  modified_base 46: mod_base = OTHER; note = 2'-O-methylguanosine
  modified_base 47: mod_base = OTHER; note = 2'-O-methylguanosine
  modified_base 48: mod_base = OTHER; note = 2'-O-methylguanosine
  modified_base 49: mod_base = OTHER; note = 2'-O-methyluridine
  modified_base 50: mod_base = OTHER; note = 2'-O-methylguanosine
  modified_base 51: mod_base = OTHER; note = 2'-O-methyluridine
  modified_base 52: mod_base = OTHER; note = 2'-O-methylguanosine
  modified_base 57: mod_base = OTHER; note = 2'-O-methyladenosine
  modified_base 58: mod_base = OTHER; note = 2'-O-methylcytidine
  modified_base 59: mod_base = OTHER; note = 2'-O-methyluridine
  modified_base 60: mod_base = OTHER; note = 2'-O-methylcytidine
  modified_base 61: mod_base = OTHER; note = 2'-O-methylcytidine
  modified_base 62: mod_base = OTHER; note = 2'-O-methyluridine
  modified_base 64: mod_base = OTHER; note = 2'-O-methyluridine
  modified_base 65: mod_base = OTHER; note = 2'-O-methyluridine
  modified_base 70: mod_base = OTHER; note = 2'-O-methylguanosine
  modified_base 71: mod_base = OTHER; note = 2'-O-methyladenosine
  modified_base 72: mod_base = OTHER; note = 2'-O-methylcytidine
  modified_base 73: mod_base = OTHER; note = 2'-O-methylguanosine
  modified_base 74: mod_base = OTHER; note = 2'-O-methyladenosine
  modified_base 75: mod_base = OTHER; note = 2'-O-methyluridine
  modified_base 76: mod_base = OTHER; note = 2'-O-methylguanosine
  modified_base 77: mod_base = OTHER; note = 2'-O-methyluridine
  modified_base 78: mod_base = OTHER; note = 2'-O-methylcytidine
  modified_base 79: mod_base = OTHER; note = 2'-O-methyluridine
  modified_base 80: mod_base = OTHER; note = 2'-O-methylcytidine
  modified_base 81: mod_base = OTHER; note = 2'-O-methyluridine
  modified_base 82: mod_base = OTHER; note = 2'-O-methyluridine
  modified_base 83: mod_base = OTHER; note = 2'-O-methyladenosine
  modified_base 84: mod_base = OTHER; note = 2'-O-methylcytidine
  modified_base 85: mod_base = OTHER; note = 2'-O-methylguanosine
  modified_base 86: mod_base = OTHER; note = 2'-O-methyladenosine
  modified_base 87: mod_base = OTHER; note = 2'-O-methylguanosine
  modified_base 117: mod_base = OTHER; note = 2'-O-methyladenosine
  modified_base 118: mod_base = OTHER; note = 2'-O-methyluridine phosphorothioate
  modified_base 119: mod_base = OTHER; note = 2'-O-methyluridine phosphorothioate
  modified_base 120: mod_base = OTHER; note = 2'-O-methylcytidine

SEQ ID NO: 378 - RNA, 120 nt, synthetic construct; identical to SEQ ID NO: 5
  source 1..120: mol_type = other RNA
  modified_base 1: mod_base = OTHER; note = 2'-O-methylguanosine phosphorothioate
  modified_base 2: mod_base = OTHER; note = 2'-O-methyluridine phosphorothioate
  modified_base 25: mod_base = OTHER; note = 2'-O-methylcytidine
  modified_base 26: mod_base = OTHER; note = 2'-O-methylguanosine
  modified_base 27: mod_base = OTHER; note = 2'-O-methyluridine
  modified_base 28: mod_base = OTHER; note = 2'-O-methylcytidine
  modified_base 29: mod_base = OTHER; note = 2'-O-methyluridine
  modified_base 30: mod_base = OTHER; note = 2'-O-methyladenosine
  modified_base 31: mod_base = OTHER; note = 2'-O-methylguanosine
  modified_base 39: mod_base = OTHER; note = 2'-O-methyluridine
  modified_base 42: mod_base = OTHER; note = 2'-O-methyluridine
  modified_base 45: mod_base = OTHER; note = 2'-O-methyladenosine
  modified_base 46: mod_base = OTHER; note = 2'-O-methylguanosine
  modified_base 47: mod_base = OTHER; note = 2'-O-methylguanosine
  modified_base 48: mod_base = OTHER; note = 2'-O-methylguanosine
  modified_base 49: mod_base = OTHER; note = 2'-O-methyluridine
  modified_base 50: mod_base = OTHER; note = 2'-O-methylguanosine
  modified_base 51: mod_base = OTHER; note = 2'-O-methyluridine
  modified_base 52: mod_base = OTHER; note = 2'-O-methylguanosine
  modified_base 57: mod_base = OTHER; note = 2'-O-methyladenosine
  modified_base 58: mod_base = OTHER; note = 2'-O-methylcytidine
  modified_base 59: mod_base = OTHER; note = 2'-O-methyluridine
  modified_base 60: mod_base = OTHER; note = 2'-O-methylcytidine
  modified_base 61: mod_base = OTHER; note = 2'-O-methylcytidine
  modified_base 62: mod_base = OTHER; note = 2'-O-methyluridine
  modified_base 64: mod_base = OTHER; note = 2'-O-methyluridine
  modified_base 65: mod_base = OTHER; note = 2'-O-methyluridine
  modified_base 70: mod_base = OTHER; note = 2'-O-methylguanosine
  modified_base 71: mod_base = OTHER; note = 2'-O-methyladenosine
  modified_base 72: mod_base = OTHER; note = 2'-O-methylcytidine
  modified_base 73: mod_base = OTHER; note = 2'-O-methylguanosine
  modified_base 74: mod_base = OTHER; note = 2'-O-methyladenosine
  modified_base 75: mod_base = OTHER; note = 2'-O-methyluridine
  modified_base 76: mod_base = OTHER; note = 2'-O-methylguanosine
  modified_base 77: mod_base = OTHER; note = 2'-O-methyluridine
  modified_base 78: mod_base = OTHER; note = 2'-O-methylcytidine
  modified_base 79: mod_base = OTHER; note = 2'-O-methyluridine
  modified_base 80: mod_base = OTHER; note = 2'-O-methylcytidine
  modified_base 81: mod_base = OTHER; note = 2'-O-methyluridine
  modified_base 82: mod_base = OTHER; note = 2'-O-methyluridine
  modified_base 83: mod_base = OTHER; note = 2'-O-methyladenosine
  modified_base 84: mod_base = OTHER; note = 2'-O-methylcytidine
  modified_base 85: mod_base = OTHER; note = 2'-O-methylguanosine
  modified_base 86: mod_base = OTHER; note = 2'-O-methyladenosine
  modified_base 87: mod_base = OTHER; note = 2'-O-methylguanosine
  modified_base 117: mod_base = OTHER; note = 2'-O-methyladenosine
  modified_base 118: mod_base = OTHER; note = 2'-O-methyluridine phosphorothioate
  modified_base 119: mod_base = OTHER; note = 2'-O-methyluridine phosphorothioate
  modified_base 120: mod_base = OTHER; note = 2'-O-methylcytidine

SEQ ID NO: 379 - RNA, 120 nt, synthetic construct; identical to SEQ ID NO: 5
  source 1..120: mol_type = other RNA
  modified_base 1: mod_base = OTHER; note = 2'-O-methylguanosine phosphorothioate
  modified_base 2: mod_base = OTHER; note = 2'-O-methyluridine phosphorothioate
  modified_base 4: mod_base = OTHER; note = 2'-O-methylcytidine
  modified_base 5: mod_base = OTHER; note = 2'-O-methyluridine
  modified_base 6: mod_base = OTHER; note = 2'-O-methylguanosine
  modified_base 7: mod_base = OTHER; note = 2'-O-methyluridine
  modified_base 11: mod_base = OTHER; note = 2'-O-methyluridine
  modified_base 16: mod_base = OTHER; note = 2'-O-methylcytidine
  modified_base 17: mod_base = OTHER; note = 2'-O-methyladenosine
  modified_base 18: mod_base = OTHER; note = 2'-O-methylguanosine
  modified_base 19: mod_base = OTHER; note = 2'-O-methylguanosine
  modified_base 20: mod_base = OTHER; note = 2'-O-methyladenosine
  modified_base 21: mod_base = OTHER; note = 2'-O-methylcytidine
  modified_base 25: mod_base = OTHER; note = 2'-O-methylcytidine
  modified_base 26: mod_base = OTHER; note = 2'-O-methylguanosine
  modified_base 27: mod_base = OTHER; note = 2'-O-methyluridine
  modified_base 28: mod_base = OTHER; note = 2'-O-methylcytidine
  modified_base 29: mod_base = OTHER; note = 2'-O-methyluridine
  modified_base 30: mod_base = OTHER; note = 2'-O-methyladenosine
  modified_base 31: mod_base = OTHER; note = 2'-O-methylguanosine
  modified_base 39: mod_base = OTHER; note = 2'-O-methyluridine
  modified_base 42: mod_base = OTHER; note = 2'-O-methyluridine
  modified_base 64: mod_base = OTHER; note = 2'-O-methyluridine
  modified_base 65: mod_base = OTHER; note = 2'-O-methyluridine
  modified_base 70: mod_base = OTHER; note = 2'-O-methylguanosine
  modified_base 71: mod_base = OTHER; note = 2'-O-methyladenosine
  modified_base 72: mod_base = OTHER; note = 2'-O-methylcytidine
  modified_base 73: mod_base = OTHER; note = 2'-O-methylguanosine
  modified_base 74: mod_base = OTHER; note = 2'-O-methyladenosine
  modified_base 75: mod_base = OTHER; note = 2'-O-methyluridine
  modified_base 76: mod_base = OTHER; note = 2'-O-methylguanosine
  modified_base 77: mod_base = OTHER; note = 2'-O-methyluridine
  modified_base 78: mod_base = OTHER; note = 2'-O-methylcytidine
  modified_base 79: mod_base = OTHER; note = 2'-O-methyluridine
  modified_base 80: mod_base = OTHER; note = 2'-O-methylcytidine
  modified_base 81: mod_base = OTHER; note = 2'-O-methyluridine
  modified_base 82: mod_base = OTHER; note = 2'-O-methyluridine
  modified_base 83: mod_base = OTHER; note = 2'-O-methyladenosine
  modified_base 84: mod_base = OTHER; note = 2'-O-methylcytidine
  modified_base 85: mod_base = OTHER; note = 2'-O-methylguanosine
  modified_base 86: mod_base = OTHER; note = 2'-O-methyladenosine
  modified_base 87: mod_base = OTHER; note = 2'-O-methylguanosine
  modified_base 117: mod_base = OTHER; note = 2'-O-methyladenosine
  modified_base 118: mod_base = OTHER; note = 2'-O-methyluridine phosphorothioate
  modified_base 119: mod_base = OTHER; note = 2'-O-methyluridine phosphorothioate
  modified_base 120: mod_base = OTHER; note = 2'-O-methylcytidine

SEQ ID NO: 380 - RNA, 120 nt, synthetic construct; identical to SEQ ID NO: 5
  source 1..120: mol_type = other RNA
  modified_base 1: mod_base = OTHER; note = 2'-O-methylguanosine phosphorothioate
  modified_base 2: mod_base = OTHER; note = 2'-O-methyluridine phosphorothioate
  modified_base 98: mod_base = OTHER; note = 2'-O-methyladenosine
  modified_base 104: mod_base = OTHER; note = 2'-O-methyluridine
  modified_base 105: mod_base = OTHER; note = 2'-O-methylcytidine
  modified_base 109: mod_base = OTHER; note = 2'-O-methylguanosine
  modified_base 110: mod_base = OTHER; note = 2'-O-methylguanosine
  modified_base 117: mod_base = OTHER; note = 2'-O-methyladenosine
  modified_base 118: mod_base = OTHER; note = 2'-O-methyluridine phosphorothioate
  modified_base 119: mod_base = OTHER; note = 2'-O-methyluridine phosphorothioate
  modified_base 120: mod_base = OTHER; note = 2'-O-methylcytidine

SEQ ID NO: 381 - RNA, 120 nt, synthetic construct; identical to SEQ ID NO: 5
  source 1..120: mol_type = other RNA
  modified_base 1: mod_base = OTHER; note = 2'-O-methylguanosine phosphorothioate
  modified_base 2: mod_base = OTHER; note = 2'-O-methyluridine phosphorothioate
  modified_base 4: mod_base = OTHER; note = 2'-O-methylcytidine
  modified_base 5: mod_base = OTHER; note = 2'-O-methyluridine
  modified_base 6: mod_base = OTHER; note = 2'-O-methylguanosine
  modified_base 7: mod_base = OTHER; note = 2'-O-methyluridine
  modified_base 11: mod_base = OTHER; note = 2'-O-methyluridine
  modified_base 16: mod_base = OTHER; note = 2'-O-methylcytidine
  modified_base 17: mod_base = OTHER; note = 2'-O-methyladenosine
  modified_base 18: mod_base = OTHER; note = 2'-O-methylguanosine
  modified_base 19: mod_base = OTHER; note = 2'-O-methylguanosine
  modified_base 20: mod_base = OTHER; note = 2'-O-methyladenosine
  modified_base 21: mod_base = OTHER; note = 2'-O-methylcytidine
  modified_base 25: mod_base = OTHER; note = 2'-O-methylcytidine
  modified_base 26: mod_base = OTHER; note = 2'-O-methylguanosine
  modified_base 27: mod_base = OTHER; note = 2'-O-methyluridine
  modified_base 28: mod_base = OTHER; note = 2'-O-methylcytidine
  modified_base 29: mod_base = OTHER; note = 2'-O-methyluridine
  modified_base 30: mod_base = OTHER; note = 2'-O-methyladenosine
  modified_base 31: mod_base = OTHER; note = 2'-O-methylguanosine
  modified_base 39: mod_base = OTHER; note = 2'-O-methyluridine
  modified_base 42: mod_base = OTHER; note = 2'-O-methyluridine
  modified_base 45: mod_base = OTHER; note = 2'-O-methyladenosine
  modified_base 46: mod_base = OTHER; note = 2'-O-methylguanosine
  modified_base 47: mod_base = OTHER; note = 2'-O-methylguanosine
  modified_base 48: mod_base = OTHER; note = 2'-O-methylguanosine
  modified_base 49: mod_base = OTHER; note = 2'-O-methyluridine
  modified_base 50: mod_base = OTHER; note = 2'-O-methylguanosine
  modified_base 51: mod_base = OTHER; note = 2'-O-methyluridine
  modified_base 52: mod_base = OTHER; note = 2'-O-methylguanosine
  modified_base 57: mod_base = OTHER; note = 2'-O-methyladenosine
  modified_base 58: mod_base = OTHER; note = 2'-O-methylcytidine
  modified_base 59: mod_base = OTHER; note = 2'-O-methyluridine
  modified_base 60: mod_base = OTHER; note = 2'-O-methylcytidine
  modified_base 61: mod_base = OTHER; note = 2'-O-methylcytidine
  modified_base 62: mod_base = OTHER; note = 2'-O-methyluridine
  modified_base 64: mod_base = OTHER; note = 2'-O-methyluridine
  modified_base 65: mod_base = OTHER; note = 2'-O-methyluridine
  modified_base 70: mod_base = OTHER; note = 2'-O-methylguanosine
  modified_base 71: mod_base = OTHER; note = 2'-O-methyladenosine
  modified_base 72: mod_base = OTHER; note = 2'-O-methylcytidine
  modified_base 73: mod_base = OTHER; note = 2'-O-methylguanosine
  modified_base 74: mod_base = OTHER; note = 2'-O-methyladenosine
  modified_base 75: mod_base = OTHER; note = 2'-O-methyluridine
  modified_base 76: mod_base = OTHER; note = 2'-O-methylguanosine
  modified_base 77: mod_base = OTHER; note = 2'-O-methyluridine
  modified_base 78: mod_base = OTHER; note = 2'-O-methylcytidine
  modified_base 79: mod_base = OTHER; note = 2'-O-methyluridine
  modified_base 80: mod_base = OTHER; note = 2'-O-methylcytidine
  modified_base 81: mod_base = OTHER; note = 2'-O-methyluridine
  modified_base 82: mod_base = OTHER; note = 2'-O-methyluridine
  modified_base 83: mod_base = OTHER; note = 2'-O-methyladenosine
  modified_base 84: mod_base = OTHER; note = 2'-O-methylcytidine
  modified_base 85: mod_base = OTHER; note = 2'-O-methylguanosine
  modified_base 86: mod_base = OTHER; note = 2'-O-methyladenosine
  modified_base 87: mod_base = OTHER; note = 2'-O-methylguanosine
  modified_base 98: mod_base = OTHER; note = 2'-O-methyladenosine
  modified_base 104: mod_base = OTHER; note = 2'-O-methyluridine
  modified_base 105: mod_base = OTHER; note = 2'-O-methylcytidine
  modified_base 109: mod_base = OTHER; note = 2'-O-methylguanosine
  modified_base 110: mod_base = OTHER; note = 2'-O-methylguanosine
  modified_base 117: mod_base = OTHER; note = 2'-O-methyladenosine
  modified_base 118: mod_base = OTHER; note = 2'-O-methyluridine phosphorothioate
  modified_base 119: mod_base = OTHER; note = 2'-O-methyluridine phosphorothioate
  modified_base 120: mod_base = OTHER; note = 2'-O-methylcytidine

SEQ ID NO: 382 - RNA, 120 nt, synthetic construct; identical to SEQ ID NO: 5
  source 1..120: mol_type = other RNA
  modified_base 1: mod_base = OTHER; note = 2'-O-methylguanosine phosphorothioate
  modified_base 2: mod_base = OTHER; note = 2'-O-methyluridine phosphorothioate
  modified_base 4: mod_base = OTHER; note = 2'-O-methylcytidine
  modified_base 5: mod_base = OTHER; note = 2'-O-methyluridine
  modified_base 6: mod_base = OTHER; note = 2'-O-methylguanosine
  modified_base 7: mod_base = OTHER; note = 2'-O-methyluridine
  modified_base 11: mod_base = OTHER; note = 2'-O-methyluridine
  modified_base 16: mod_base = OTHER; note = 2'-O-methylcytidine
  modified_base 17: mod_base = OTHER; note = 2'-O-methyladenosine
  modified_base 18: mod_base = OTHER; note = 2'-O-methylguanosine
  modified_base 19: mod_base = OTHER; note = 2'-O-methylguanosine
  modified_base 20: mod_base = OTHER; note = 2'-O-methyladenosine
  modified_base 21: mod_base = OTHER; note = 2'-O-methylcytidine
  modified_base 25: mod_base = OTHER; note = 2'-O-methylcytidine
  modified_base 26: mod_base = OTHER; note = 2'-O-methylguanosine
  modified_base 27: mod_base = OTHER; note = 2'-O-methyluridine
  modified_base 28: mod_base = OTHER; note = 2'-O-methylcytidine
  modified_base 29: mod_base = OTHER; note = 2'-O-methyluridine
  modified_base 30: mod_base = OTHER; note = 2'-O-methyladenosine
  modified_base 31: mod_base = OTHER; note = 2'-O-methylguanosine
  modified_base 39: mod_base = OTHER; note = 2'-O-methyluridine
  modified_base 42: mod_base = OTHER; note = 2'-O-methyluridine
  modified_base 45: mod_base = OTHER; note = 2'-O-methyladenosine
  modified_base 46: mod_base = OTHER; note = 2'-O-methylguanosine
  modified_base 47: mod_base = OTHER; note = 2'-O-methylguanosine
  modified_base 48: mod_base = OTHER; note = 2'-O-methylguanosine
  modified_base 49: mod_base = OTHER; note = 2'-O-methyluridine
  modified_base 50: mod_base = OTHER; note = 2'-O-methylguanosine
  modified_base 51: mod_base = OTHER; note = 2'-O-methyluridine
  modified_base 52: mod_base = OTHER; note = 2'-O-methylguanosine
  modified_base 57: mod_base = OTHER; note = 2'-O-methyladenosine
  modified_base 58: mod_base = OTHER; note = 2'-O-methylcytidine
  modified_base 59: mod_base = OTHER; note = 2'-O-methyluridine
  modified_base 60: mod_base = OTHER; note = 2'-O-methylcytidine
  modified_base 61: mod_base = OTHER; note = 2'-O-methylcytidine
  modified_base 62: mod_base = OTHER; note = 2'-O-methyluridine
  modified_base 64: mod_base = OTHER; note = 2'-O-methyluridine
  modified_base 65: mod_base = OTHER; note = 2'-O-methyluridine
  modified_base 70: mod_base = OTHER; note = 2'-O-methylguanosine
  modified_base 71: mod_base = OTHER; note = 2'-O-methyladenosine
  modified_base 72: mod_base = OTHER; note = 2'-O-methylcytidine
  modified_base 73: mod_base = OTHER; note = 2'-O-methylguanosine
  modified_base 74: mod_base = OTHER; note = 2'-O-methyladenosine
  modified_base 75: mod_base = OTHER; note = 2'-O-methyluridine
  modified_base 76: mod_base = OTHER; note = 2'-O-methylguanosine
  modified_base 77: mod_base = OTHER; note = 2'-O-methyluridine
  modified_base 78: mod_base = OTHER; note = 2'-O-methylcytidine
  modified_base 79: mod_base = OTHER; note = 2'-O-methyluridine
  modified_base 80: mod_base = OTHER; note = 2'-O-methylcytidine
  modified_base 81: mod_base = OTHER; note = 2'-O-methyluridine
  modified_base 82: mod_base = OTHER; note = 2'-O-methyluridine
  modified_base 83: mod_base = OTHER; note = 2'-O-methyladenosine
  modified_base 84: mod_base = OTHER; note = 2'-O-methylcytidine
  modified_base 85: mod_base = OTHER; note = 2'-O-methylguanosine
  modified_base 86: mod_base = OTHER; note = 2'-O-methyladenosine
  modified_base 87: mod_base = OTHER; note = 2'-O-methylguanosine
  modified_base 98: mod_base = OTHER; note = 2'-O-methyladenosine
  modified_base 101: mod_base = OTHER; note = 2'-O-methyluridine
  modified_base 104: mod_base = OTHER; note = 2'-O-methyluridine
  modified_base 105: mod_base = OTHER; note = 2'-O-methylcytidine
  modified_base 108: mod_base = OTHER; note = 2'-O-methyluridine
  modified_base 109: mod_base = OTHER; note = 2'-O-methylguanosine
  modified_base 110: mod_base = OTHER; note = 2'-O-methylguanosine
  modified_base 115: mod_base = OTHER; note = 2'-O-methyluridine
  modified_base 117: mod_base = OTHER; note = 2'-O-methyladenosine
  modified_base 118: mod_base = OTHER; note = 2'-O-methyluridine phosphorothioate
  modified_base 119: mod_base = OTHER; note = 2'-O-methyluridine phosphorothioate
  modified_base 120: mod_base = OTHER; note = 2'-O-methylcytidine

SEQ ID NO: 383 - RNA, 120 nt, synthetic construct; identical to SEQ ID NO: 5
  source 1..120: mol_type = other RNA
  modified_base 1: mod_base = OTHER; note = 2'-O-methylguanosine phosphorothioate
  modified_base 2: mod_base = OTHER; note = 2'-O-methyluridine phosphorothioate
  modified_base 4: mod_base = OTHER; note = 2'-O-methylcytidine
  modified_base 5: mod_base = OTHER; note = 2'-O-methyluridine
  modified_base 6: mod_base = OTHER; note = 2'-O-methylguanosine
  modified_base 7: mod_base = OTHER; note = 2'-O-methyluridine
  modified_base 11: mod_base = OTHER; note = 2'-O-methyluridine
  modified_base 16: mod_base = OTHER; note = 2'-O-methylcytidine
  modified_base 17: mod_base = OTHER; note = 2'-O-methyladenosine
  modified_base 18: mod_base = OTHER; note = 2'-O-methylguanosine
  modified_base 19: mod_base = OTHER; note = 2'-O-methylguanosine
  modified_base 20: mod_base = OTHER; note = 2'-O-methyladenosine
  modified_base 21: mod_base = OTHER; note = 2'-O-methylcytidine
  modified_base 25: mod_base = OTHER; note = 2'-O-methylcytidine
  modified_base 26: mod_base = OTHER; note = 2'-O-methylguanosine
  modified_base 27: mod_base = OTHER; note = 2'-O-methyluridine
  modified_base 28: mod_base = OTHER; note = 2'-O-methylcytidine
  modified_base 29: mod_base = OTHER; note = 2'-O-methyluridine
  modified_base 30: mod_base = OTHER; note = 2'-O-methyladenosine
  modified_base 31: mod_base = OTHER; note = 2'-O-methylguanosine
  modified_base 33: mod_base = OTHER; note = 2'-O-methyluridine
  modified_base 39: mod_base = OTHER; note = 2'-O-methyluridine
  modified_base 42: mod_base = OTHER; note = 2'-O-methyluridine
  modified_base 45: mod_base = OTHER; note = 2'-O-methyladenosine
  modified_base 46: mod_base = OTHER; note = 2'-O-methylguanosine
  modified_base 47: mod_base = OTHER; note = 2'-O-methylguanosine
  modified_base 48: mod_base = OTHER; note = 2'-O-methylguanosine
  modified_base 49: mod_base = OTHER; note = 2'-O-methyluridine
  modified_base 50: mod_base = OTHER; note = 2'-O-methylguanosine
  modified_base 51: mod_base = OTHER; note = 2'-O-methyluridine
  modified_base 52: mod_base = OTHER; note = 2'-O-methylguanosine
  modified_base 57: mod_base = OTHER; note = 2'-O-methyladenosine
  modified_base 58: mod_base = OTHER; note = 2'-O-methylcytidine
  modified_base 59: mod_base = OTHER; note = 2'-O-methyluridine
  modified_base 60: mod_base = OTHER; note = 2'-O-methylcytidine
  modified_base 61: mod_base = OTHER; note = 2'-O-methylcytidine
  modified_base 62: mod_base = OTHER; note = 2'-O-methyluridine
  modified_base 64: mod_base = OTHER; note = 2'-O-methyluridine
  modified_base 65: mod_base = OTHER; note = 2'-O-methyluridine
  modified_base 70: mod_base = OTHER; note = 2'-O-methylguanosine
  modified_base 71: mod_base = OTHER; note = 2'-O-methyladenosine
  modified_base 72: mod_base = OTHER; note = 2'-O-methylcytidine
  modified_base 73: mod_base = OTHER; note = 2'-O-methylguanosine
  modified_base 74: mod_base = OTHER; note = 2'-O-methyladenosine
  modified_base 75: mod_base = OTHER; note = 2'-O-methyluridine
  modified_base 76: mod_base = OTHER; note = 2'-O-methylguanosine
  modified_base 77: mod_base = OTHER; note = 2'-O-methyluridine
  modified_base 78: mod_base = OTHER; note = 2'-O-methylcytidine
  modified_base 79: mod_base = OTHER; note = 2'-O-methyluridine
  modified_base 80: mod_base = OTHER; note = 2'-O-methylcytidine
  modified_base 81: mod_base = OTHER; note = 2'-O-methyluridine
  modified_base 82: mod_base = OTHER; note = 2'-O-methyluridine
  modified_base 83: mod_base = OTHER; note = 2'-O-methyladenosine
  modified_base 84: mod_base = OTHER; note = 2'-O-methylcytidine
  modified_base 85: mod_base = OTHER; note = 2'-O-methylguanosine
  modified_base 86: mod_base = OTHER; note = 2'-O-methyladenosine
  modified_base 87: mod_base = OTHER; note = 2'-O-methylguanosine
  modified_base 89: mod_base = OTHER; note = 2'-O-methylcytidine
  modified_base 98: mod_base = OTHER; note = 2'-O-methyladenosine
  modified_base 101: mod_base = OTHER; note = 2'-O-methyluridine
  modified_base 104: mod_base = OTHER; note = 2'-O-methyluridine
  modified_base 105: mod_base = OTHER; note = 2'-O-methylcytidine
  modified_base 108: mod_base = OTHER; note = 2'-O-methyluridine
  modified_base 109: mod_base = OTHER; note = 2'-O-methylguanosine
  modified_base 110: mod_base = OTHER; note = 2'-O-methylguanosine
  modified_base 115: mod_base = OTHER; note = 2'-O-methyluridine
  modified_base 117: mod_base = OTHER; note = 2'-O-methyladenosine
  modified_base 118: mod_base = OTHER; note = 2'-O-methyluridine phosphorothioate
  modified_base 119: mod_base = OTHER; note = 2'-O-methyluridine phosphorothioate
  modified_base 120: mod_base = OTHER; note = 2'-O-methylcytidine

SEQ ID NO: 384 - RNA, 120 nt, synthetic construct; identical to SEQ ID NO: 5
  source 1..120: mol_type = other RNA
  modified_base 1: mod_base = OTHER; note = 2'-O-methylguanosine phosphorothioate
  modified_base 2: mod_base = OTHER; note = 2'-O-methyluridine phosphorothioate
  modified_base 3: mod_base = OTHER; note = 2'-O-methyluridine
  modified_base 117: mod_base = OTHER; note = 2'-O-methyladenosine
  modified_base 118: mod_base = OTHER; note = 2'-O-methyluridine phosphorothioate
  modified_base 119: mod_base = OTHER; note = 2'-O-methyluridine phosphorothioate
  modified_base 120: mod_base = OTHER; note = 2'-O-methylcytidine

SEQ ID NO: 385 - RNA, 120 nt, synthetic construct; identical to SEQ ID NO: 5
  source 1..120: mol_type = other RNA
  modified_base 1: mod_base = OTHER; note = 2'-O-methylguanosine phosphorothioate
  modified_base 2: mod_base = OTHER; note = 2'-O-methyluridine phosphorothioate
  modified_base 3: mod_base = OTHER; note = 2'-O-methyluridine
  modified_base 98: mod_base = OTHER; note = 2'-O-methyladenosine
  modified_base 101: mod_base = OTHER; note = 2'-O-methyluridine
  modified_base 104: mod_base = OTHER; note = 2'-O-methyluridine
  modified_base 105: mod_base = OTHER; note = 2'-O-methylcytidine
  modified_base 108: mod_base = OTHER; note = 2'-O-methyluridine
  modified_base 109: mod_base = OTHER; note = 2'-O-methylguanosine
  modified_base 110: mod_base = OTHER; note = 2'-O-methylguanosine
  modified_base 115: mod_base = OTHER; note = 2'-O-methyluridine
  modified_base 117: mod_base = OTHER; note = 2'-O-methyladenosine
  modified_base 118: mod_base = OTHER; note = 2'-O-methyluridine phosphorothioate
  modified_base 119: mod_base = OTHER; note = 2'-O-methyluridine phosphorothioate
  modified_base 120: mod_base = OTHER; note = 2'-O-methylcytidine

SEQ ID NO: 386 - RNA, 120 nt, synthetic construct; identical to SEQ ID NO: 5
  source 1..120: mol_type = other RNA
  modified_base 1: mod_base = OTHER; note = 2'-O-methylguanosine phosphorothioate
  modified_base 2: mod_base = OTHER; note = 2'-O-methyluridine phosphorothioate
  modified_base 3: mod_base = OTHER; note = 2'-O-methyluridine
  modified_base 104: mod_base = OTHER; note = 2'-O-methyluridine
  modified_base 105: mod_base = OTHER; note = 2'-O-methylcytidine
  modified_base 109: mod_base = OTHER; note = 2'-O-methylguanosine
  modified_base 110: mod_base = OTHER; note = 2'-O-methylguanosine
  modified_base 117: mod_base = OTHER; note = 2'-O-methyladenosine
  modified_base 118: mod_base = OTHER; note = 2'-O-methyluridine phosphorothioate
  modified_base 119: mod_base = OTHER; note = 2'-O-methyluridine phosphorothioate
  modified_base 120: mod_base = OTHER; note = 2'-O-methylcytidine

SEQ ID NO: 387 - RNA, 120 nt, synthetic construct; identical to SEQ ID NO: 5
  source 1..120: mol_type = other RNA
  modified_base 1: mod_base = OTHER; note = 2'-O-methylguanosine phosphorothioate
  modified_base 2: mod_base = OTHER; note = 2'-O-methyluridine phosphorothioate
  modified_base 3: mod_base = OTHER; note = 2'-O-methyluridine
  modified_base 5: mod_base = OTHER; note = 2'-O-methyluridine
  modified_base 16: mod_base = OTHER; note = 2'-O-methylcytidine
  modified_base 21: mod_base = OTHER; note = 2'-O-methylcytidine
  modified_base 25: mod_base = OTHER; note = 2'-O-methylcytidine
  modified_base 26: mod_base = OTHER; note = 2'-O-methylguanosine
  modified_base 29: mod_base = OTHER; note = 2'-O-methyluridine
  modified_base 30: mod_base = OTHER; note = 2'-O-methyladenosine
  modified_base 44: mod_base = OTHER; note = 2'-O-methylcytidine
  modified_base 45: mod_base = OTHER; note = 2'-O-methyladenosine
  modified_base 49: mod_base = OTHER; note = 2'-O-methyluridine
  modified_base 50: mod_base = OTHER; note = 2'-O-methylguanosine
  modified_base 62: mod_base = OTHER; note = 2'-O-methyluridine
  modified_base 63: mod_base = OTHER; note = 2'-O-methyladenosine
  modified_base 67: mod_base = OTHER; note = 2'-O-methylcytidine
  modified_base 68: mod_base = OTHER; note = 2'-O-methyluridine
  modified_base 69: mod_base = OTHER; note = 2'-O-methylguanosine
  modified_base 72: mod_base = OTHER; note = 2'-O-methylcytidine
  modified_base 75: mod_base = OTHER; note = 2'-O-methyluridine
  modified_base 76: mod_base = OTHER; note = 2'-O-methylguanosine
  modified_base 79: mod_base = OTHER; note = 2'-O-methyluridine
  modified_base 82: mod_base = OTHER; note = 2'-O-methyluridine
  modified_base 83: mod_base = OTHER; note = 2'-O-methyladenosine
  modified_base 84: mod_base = OTHER; note = 2'-O-methylcytidine
  modified_base 117: mod_base = OTHER; note = 2'-O-methyladenosine
  modified_base 118: mod_base = OTHER; note = 2'-O-methyluridine phosphorothioate
  modified_base 119: mod_base = OTHER; note = 2'-O-methyluridine phosphorothioate
  modified_base 120: mod_base = OTHER; note = 2'-O-methylcytidine

SEQ ID NO: 388 - RNA, 120 nt, synthetic construct; identical to SEQ ID NO: 5
  source 1..120: mol_type = other RNA
  modified_base 1: mod_base = OTHER; note = 2'-O-methylguanosine phosphorothioate
  modified_base 2: mod_base = OTHER; note = 2'-O-methyluridine phosphorothioate
  modified_base 3: mod_base = OTHER; note = 2'-O-methyluridine
  modified_base 5: mod_base = OTHER; note = 2'-O-methyluridine
  modified_base 16: mod_base = OTHER; note = 2'-O-methylcytidine
  modified_base 21: mod_base = OTHER; note = 2'-O-methylcytidine
  modified_base 25: mod_base = OTHER; note = 2'-O-methylcytidine
  modified_base 26: mod_base = OTHER; note = 2'-O-methylguanosine
  modified_base 29: mod_base = OTHER; note = 2'-O-methyluridine
  modified_base 30: mod_base = OTHER; note = 2'-O-methyladenosine
  modified_base 33: mod_base = OTHER; note = 2'-O-methyluridine
  modified_base 35: mod_base = OTHER; note = 2'-O-methyluridine
  modified_base 37: mod_base = OTHER; note = 2'-O-methyladenosine
  modified_base 39: mod_base = OTHER; note = 2'-O-methyluridine
  modified_base 44: mod_base = OTHER; note = 2'-O-methylcytidine
  modified_base 45: mod_base = OTHER; note = 2'-O-methyladenosine
  modified_base 47: mod_base = OTHER; note = 2'-O-methylguanosine
  modified_base 49: mod_base = OTHER; note = 2'-O-methyluridine
  modified_base 50: mod_base = OTHER; note = 2'-O-methylguanosine
  modified_base 51: mod_base = OTHER; note = 2'-O-methyluridine
  modified_base 62: mod_base = OTHER; note = 2'-O-methyluridine
  modified_base 63: mod_base = OTHER; note = 2'-O-methyladenosine
  modified_base 65: mod_base = OTHER; note = 2'-O-methyluridine
  modified_base 67: mod_base = OTHER; note = 2'-O-methylcytidine
  modified_base 68: mod_base = OTHER; note = 2'-O-methyluridine
  modified_base 69: mod_base = OTHER; note = 2'-O-methylguanosine
  modified_base 72: mod_base = OTHER; note = 2'-O-methylcytidine
  modified_base 75: mod_base = OTHER; note = 2'-O-methyluridine
  modified_base 76: mod_base = OTHER; note = 2'-O-methylguanosine
  modified_base 79: mod_base = OTHER; note = 2'-O-methyluridine
  modified_base 82: mod_base = OTHER; note = 2'-O-methyluridine
  modified_base 83: mod_base = OTHER; note = 2'-O-methyladenosine
  modified_base 84: mod_base = OTHER; note = 2'-O-methylcytidine
  modified_base 86: mod_base = OTHER; note = 2'-O-methyladenosine
  modified_base 87: mod_base = OTHER; note = 2'-O-methylguanosine
  modified_base 89: mod_base = OTHER; note = 2'-O-methylcytidine
  modified_base 92: mod_base = OTHER; note = 2'-O-methyluridine
  modified_base 95: mod_base = OTHER; note = 2'-O-methylcytidine
  modified_base 117: mod_base = OTHER; note = 2'-O-methyladenosine
  modified_base 118: mod_base = OTHER; note = 2'-O-methyluridine phosphorothioate
  modified_base 119: mod_base = OTHER; note = 2'-O-methyluridine phosphorothioate
  modified_base 120: mod_base = OTHER; note = 2'-O-methylcytidine

SEQ ID NO: 389 - RNA, 120 nt, synthetic construct; identical to SEQ ID NO: 5
  source 1..120: mol_type = other RNA
  modified_base 1: mod_base = OTHER; note = 2'-O-methylguanosine phosphorothioate
  modified_base 2: mod_base = OTHER; note = 2'-O-methyluridine phosphorothioate
  modified_base 3: mod_base = OTHER; note = 2'-O-methyluridine
  modified_base 4: mod_base = OTHER; note = 2'-O-methylcytidine
  modified_base 5: mod_base = OTHER; note = 2'-O-methyluridine
  modified_base 6: mod_base = OTHER; note = 2'-O-methylguanosine
  modified_base 7: mod_base = OTHER; note = 2'-O-methyluridine
  modified_base 11: mod_base = OTHER; note = 2'-O-methyluridine
  modified_base 16: mod_base = OTHER; note = 2'-O-methylcytidine
  modified_base 17: mod_base = OTHER; note = 2'-O-methyladenosine
  modified_base 18: mod_base = OTHER; note = 2'-O-methylguanosine
  modified_base 19: mod_base = OTHER; note = 2'-O-methylguanosine
  modified_base 20: mod_base = OTHER; note = 2'-O-methyladenosine
  modified_base 21: mod_base = OTHER; note = 2'-O-methylcytidine
  modified_base 25: mod_base = OTHER; note = 2'-O-methylcytidine
  modified_base 26: mod_base = OTHER; note = 2'-O-methylguanosine
  modified_base 27: mod_base = OTHER; note = 2'-O-methyluridine
  modified_base 28: mod_base = OTHER; note = 2'-O-methylcytidine
  modified_base 29: mod_base = OTHER; note = 2'-O-methyluridine
  modified_base 30: mod_base = OTHER; note = 2'-O-methyladenosine
  modified_base 31: mod_base = OTHER; note = 2'-O-methylguanosine
  modified_base 39: mod_base = OTHER; note = 2'-O-methyluridine
  modified_base 42: mod_base = OTHER; note = 2'-O-methyluridine
  modified_base 45: mod_base = OTHER; note = 2'-O-methyladenosine
  modified_base 46: mod_base = OTHER; note = 2'-O-methylguanosine
  modified_base 47: mod_base = OTHER; note = 2'-O-methylguanosine
  modified_base 48: mod_base = OTHER; note = 2'-O-methylguanosine
  modified_base 49: mod_base = OTHER; note = 2'-O-methyluridine
  modified_base 50: mod_base = OTHER; note = 2'-O-methylguanosine
  modified_base 51: mod_base = OTHER; note = 2'-O-methyluridine
  modified_base 52: mod_base = OTHER; note = 2'-O-methylguanosine
  modified_base 57: mod_base = OTHER; note = 2'-O-methyladenosine
  modified_base 58: mod_base = OTHER; note = 2'-O-methylcytidine
  modified_base 59: mod_base = OTHER; note = 2'-O-methyluridine
  modified_base 60: mod_base = OTHER; note = 2'-O-methylcytidine
  modified_base 61: mod_base = OTHER; note = 2'-O-methylcytidine
  modified_base 62: mod_base = OTHER; note = 2'-O-methyluridine
  modified_base 64: mod_base = OTHER; note = 2'-O-methyluridine
  modified_base 65: mod_base = OTHER; note = 2'-O-methyluridine
  modified_base 70: mod_base = OTHER; note = 2'-O-methylguanosine
  modified_base 71: mod_base = OTHER; note = 2'-O-methyladenosine
  modified_base 72: mod_base = OTHER; note = 2'-O-methylcytidine
  modified_base 73: mod_base = OTHER; note = 2'-O-methylguanosine
  modified_base 74: mod_base = OTHER; note = 2'-O-methyladenosine
  modified_base 75: mod_base = OTHER; note = 2'-O-methyluridine
  modified_base 76: mod_base = OTHER; note = 2'-O-methylguanosine
  modified_base 77: mod_base = OTHER; note = 2'-O-methyluridine
  modified_base 78: mod_base = OTHER; note = 2'-O-methylcytidine
  modified_base 79: mod_base = OTHER; note = 2'-O-methyluridine
  modified_base 80: mod_base = OTHER; note = 2'-O-methylcytidine
  modified_base 81: mod_base = OTHER; note = 2'-O-methyluridine
  modified_base 82: mod_base = OTHER; note = 2'-O-methyluridine
  modified_base 83: mod_base = OTHER; note = 2'-O-methyladenosine
  modified_base 84: mod_base = OTHER; note = 2'-O-methylcytidine
  modified_base 85: mod_base = OTHER; note = 2'-O-methylguanosine
  modified_base 86: mod_base = OTHER; note = 2'-O-methyladenosine
  modified_base 87: mod_base = OTHER; note = 2'-O-methylguanosine
  modified_base 117: mod_base = OTHER; note = 2'-O-methyladenosine
  modified_base 118: mod_base = OTHER; note = 2'-O-methyluridine phosphorothioate
  modified_base 119: mod_base = OTHER; note = 2'-O-methyluridine phosphorothioate
  modified_base 120: mod_base = OTHER; note = 2'-O-methylcytidine

SEQ ID NO: 390 - RNA, 120 nt, synthetic construct; identical to SEQ ID NO: 5
  source 1..120: mol_type = other RNA
  modified_base 1: mod_base = OTHER; note = 2'-O-methylguanosine phosphorothioate
  modified_base 2: mod_base = OTHER; note = 2'-O-methyluridine phosphorothioate
  modified_base 3: mod_base = OTHER; note = 2'-O-methyluridine
  modified_base 4: mod_base = OTHER; note = 2'-O-methylcytidine
  modified_base 5: mod_base = OTHER; note = 2'-O-methyluridine
  modified_base 6: mod_base = OTHER; note = 2'-O-methylguanosine
  modified_base 7: mod_base = OTHER; note = 2'-O-methyluridine
  modified_base 11: mod_base = OTHER; note = 2'-O-methyluridine
  modified_base 16: mod_base = OTHER; note = 2'-O-methylcytidine
  modified_base 17: mod_base = OTHER; note = 2'-O-methyladenosine
  modified_base 18: mod_base = OTHER; note = 2'-O-methylguanosine
  modified_base 19: mod_base = OTHER; note = 2'-O-methylguanosine
  modified_base 20: mod_base = OTHER; note = 2'-O-methyladenosine
  modified_base 21: mod_base = OTHER; note = 2'-O-methylcytidine
  modified_base 25: mod_base = OTHER; note = 2'-O-methylcytidine
  modified_base 26: mod_base = OTHER; note = 2'-O-methylguanosine
  modified_base 27: mod_base = OTHER; note = 2'-O-methyluridine
  modified_base 28: mod_base = OTHER; note = 2'-O-methylcytidine
  modified_base 29: mod_base = OTHER; note = 2'-O-methyluridine
  modified_base 30: mod_base = OTHER; note = 2'-O-methyladenosine
  modified_base 31: mod_base = OTHER; note = 2'-O-methylguanosine
  modified_base 45: mod_base = OTHER; note = 2'-O-methyladenosine
  modified_base 46: mod_base = OTHER; note = 2'-O-methylguanosine
  modified_base 47: mod_base = OTHER; note = 2'-O-methylguanosine
  modified_base 48: mod_base = OTHER; note = 2'-O-methylguanosine
  modified_base 49: mod_base = OTHER; note = 2'-O-methyluridine
  modified_base 50: mod_base = OTHER; note = 2'-O-methylguanosine
  modified_base 51: mod_base = OTHER; note = 2'-O-methyluridine
  modified_base 52: mod_base = OTHER; note = 2'-O-methylguanosine
  modified_base 57: mod_base = OTHER; note = 2'-O-methyladenosine
  modified_base 58: mod_base = OTHER; note = 2'-O-methylcytidine
  modified_base 59: mod_base = OTHER; note = 2'-O-methyluridine
  modified_base 60: mod_base = OTHER; note = 2'-O-methylcytidine
  modified_base 61: mod_base = OTHER; note = 2'-O-methylcytidine
  modified_base 62: mod_base = OTHER; note = 2'-O-methyluridine
  modified_base 64: mod_base = OTHER; note = 2'-O-methyluridine
  modified_base 65: mod_base = OTHER; note = 2'-O-methyluridine
  modified_base 70: mod_base = OTHER; note = 2'-O-methylguanosine
  modified_base 71: mod_base = OTHER; note = 2'-O-methyladenosine
  modified_base 72: mod_base = OTHER; note = 2'-O-methylcytidine
  modified_base 73: mod_base = OTHER; note = 2'-O-methylguanosine
  modified_base 74: mod_base = OTHER; note = 2'-O-methyladenosine
  modified_base 75: mod_base = OTHER; note = 2'-O-methyluridine
  modified_base 76: mod_base = OTHER; note = 2'-O-methylguanosine
  modified_base 77: mod_base = OTHER; note = 2'-O-methyluridine
  modified_base 78: mod_base = OTHER; note = 2'-O-methylcytidine
  modified_base 79: mod_base = OTHER; note = 2'-O-methyluridine
  modified_base 80: mod_base = OTHER; note = 2'-O-methylcytidine
  modified_base 81: mod_base = OTHER; note = 2'-O-methyluridine
  modified_base 82: mod_base = OTHER; note = 2'-O-methyluridine
  modified_base 83: mod_base = OTHER; note = 2'-O-methyladenosine
  modified_base 84: mod_base = OTHER; note = 2'-O-methylcytidine
  modified_base 85: mod_base = OTHER; note = 2'-O-methylguanosine
  modified_base 86: mod_base = OTHER; note = 2'-O-methyladenosine
  modified_base 87: mod_base = OTHER; note = 2'-O-methylguanosine
  modified_base 117: mod_base = OTHER; note = 2'-O-methyladenosine
  modified_base 118: mod_base = OTHER; note = 2'-O-methyluridine phosphorothioate
  modified_base 119: mod_base = OTHER; note = 2'-O-methyluridine phosphorothioate
  modified_base 120: mod_base = OTHER; note = 2'-O-methylcytidine

SEQ ID NO: 391 - RNA, 120 nt, synthetic construct; identical to SEQ ID NO: 5
  source 1..120: mol_type = other RNA
  modified_base 1: mod_base = OTHER; note = 2'-O-methylguanosine phosphorothioate
  modified_base 2: mod_base = OTHER; note = 2'-O-methyluridine phosphorothioate
  modified_base 3: mod_base = OTHER; note = 2'-O-methyluridine
  modified_base 25: mod_base = OTHER; note = 2'-O-methylcytidine
  modified_base 26: mod_base = OTHER; note = 2'-O-methylguanosine
  modified_base 27: mod_base = OTHER; note = 2'-O-methyluridine
  modified_base 28: mod_base = OTHER; note = 2'-O-methylcytidine
  modified_base 29: mod_base = OTHER; note = 2'-O-methyluridine
  modified_base 30: mod_base = OTHER; note = 2'-O-methyladenosine
  modified_base 31: mod_base = OTHER; note = 2'-O-methylguanosine
  modified_base 39: mod_base = OTHER; note = 2'-O-methyluridine
  modified_base 42: mod_base = OTHER; note = 2'-O-methyluridine
  modified_base 45: mod_base = OTHER; note = 2'-O-methyladenosine
  modified_base 46: mod_base = OTHER; note = 2'-O-methylguanosine
  modified_base 47: mod_base = OTHER; note = 2'-O-methylguanosine
  modified_base 48: mod_base = OTHER; note = 2'-O-methylguanosine
  modified_base 49: mod_base = OTHER; note = 2'-O-methyluridine
  modified_base 50: mod_base = OTHER; note = 2'-O-methylguanosine
  modified_base 51: mod_base = OTHER; note = 2'-O-methyluridine
  modified_base 52: mod_base = OTHER; note = 2'-O-methylguanosine
  modified_base 57: mod_base = OTHER; note = 2'-O-methyladenosine
  modified_base 58: mod_base = OTHER; note = 2'-O-methylcytidine
  modified_base 59: mod_base = OTHER; note = 2'-O-methyluridine
  modified_base 60: mod_base = OTHER; note = 2'-O-methylcytidine
  modified_base 61: mod_base = OTHER; note = 2'-O-methylcytidine
  modified_base 62: mod_base = OTHER; note = 2'-O-methyluridine
  modified_base 64: mod_base = OTHER; note = 2'-O-methyluridine
  modified_base 65: mod_base = OTHER; note = 2'-O-methyluridine
  modified_base 70: mod_base = OTHER; note = 2'-O-methylguanosine
  modified_base 71: mod_base = OTHER; note = 2'-O-methyladenosine
  modified_base 72: mod_base = OTHER; note = 2'-O-methylcytidine
  modified_base 73: mod_base = OTHER; note = 2'-O-methylguanosine
  modified_base 74: mod_base = OTHER; note = 2'-O-methyladenosine
  modified_base 75: mod_base = OTHER; note = 2'-O-methyluridine
  modified_base 76: mod_base = OTHER; note = 2'-O-methylguanosine
  modified_base 77: mod_base = OTHER; note = 2'-O-methyluridine
  modified_base 78: mod_base = OTHER; note = 2'-O-methylcytidine
  modified_base 79: mod_base = OTHER; note = 2'-O-methyluridine
  modified_base 80: mod_base = OTHER; note = 2'-O-methylcytidine
  modified_base 81: mod_base = OTHER; note = 2'-O-methyluridine
  modified_base 82: mod_base = OTHER; note = 2'-O-methyluridine
  modified_base 83: mod_base = OTHER; note = 2'-O-methyladenosine
  modified_base 84: mod_base = OTHER; note = 2'-O-methylcytidine
  modified_base 85: mod_base = OTHER; note = 2'-O-methylguanosine
  modified_base 86: mod_base = OTHER; note = 2'-O-methyladenosine
  modified_base 87: mod_base = OTHER; note = 2'-O-methylguanosine
  modified_base 117: mod_base = OTHER; note = 2'-O-methyladenosine
  modified_base 118: mod_base = OTHER; note = 2'-O-methyluridine phosphorothioate
  modified_base 119: mod_base = OTHER; note = 2'-O-methyluridine phosphorothioate
  modified_base 120: mod_base = OTHER; note = 2'-O-methylcytidine

SEQ ID NO: 392 - RNA, 120 nt, synthetic construct; identical to SEQ ID NO: 5
  source 1..120: mol_type = other RNA
  modified_base 1: mod_base = OTHER; note = 2'-O-methylguanosine phosphorothioate
  modified_base 2: mod_base = OTHER; note = 2'-O-methyluridine phosphorothioate
  modified_base 3: mod_base = OTHER; note = 2'-O-methyluridine
  modified_base 4: mod_base = OTHER; note = 2'-O-methylcytidine
  modified_base 5: mod_base = OTHER; note = 2'-O-methyluridine
  modified_base 6: mod_base = OTHER; note = 2'-O-methylguanosine
  modified_base 7: mod_base = OTHER; note = 2'-O-methyluridine
  modified_base 11: mod_base = OTHER; note = 2'-O-methyluridine
  modified_base 16: mod_base = OTHER; note = 2'-O-methylcytidine
  modified_base 17: mod_base = OTHER; note = 2'-O-methyladenosine
  modified_base 18: mod_base = OTHER; note = 2'-O-methylguanosine
  modified_base 19: mod_base = OTHER; note = 2'-O-methylguanosine
  modified_base 20: mod_base = OTHER; note = 2'-O-methyladenosine
  modified_base 21: mod_base = OTHER; note = 2'-O-methylcytidine
  modified_base 25: mod_base = OTHER; note = 2'-O-methylcytidine
  modified_base 26: mod_base = OTHER; note = 2'-O-methylguanosine
  modified_base 27: mod_base = OTHER; note = 2'-O-methyluridine
  modified_base 28: mod_base = OTHER; note = 2'-O-methylcytidine
  modified_base 29: mod_base = OTHER; note = 2'-O-methyluridine
  modified_base 30: mod_base = OTHER; note = 2'-O-methyladenosine
  modified_base 31: mod_base = OTHER; note = 2'-O-methylguanosine
  modified_base 39: mod_base = OTHER; note = 2'-O-methyluridine
  modified_base 42: mod_base = OTHER; note = 2'-O-methyluridine
  modified_base 64: mod_base = OTHER; note = 2'-O-methyluridine
  modified_base 65: mod_base = OTHER; note = 2'-O-methyluridine
  modified_base 70: mod_base = OTHER; note = 2'-O-methylguanosine
  modified_base 71: mod_base = OTHER; note = 2'-O-methyladenosine
  modified_base 72: mod_base = OTHER; note = 2'-O-methylcytidine
  modified_base 73: mod_base = OTHER; note = 2'-O-methylguanosine
  modified_base 74: mod_base = OTHER; note = 2'-O-methyladenosine
  modified_base 75: mod_base = OTHER; note = 2'-O-methyluridine
  modified_base 76: mod_base = OTHER; note = 2'-O-methylguanosine
  modified_base 77: mod_base = OTHER; note = 2'-O-methyluridine
  modified_base 78: mod_base = OTHER; note = 2'-O-methylcytidine
  modified_base 79: mod_base = OTHER; note = 2'-O-methyluridine
  modified_base 80: mod_base = OTHER; note = 2'-O-methylcytidine
  modified_base 81: mod_base = OTHER; note = 2'-O-methyluridine
  modified_base 82: mod_base = OTHER; note = 2'-O-methyluridine
  modified_base 83: mod_base = OTHER; note = 2'-O-methyladenosine
  modified_base 84: mod_base = OTHER; note = 2'-O-methylcytidine
  modified_base 85: mod_base = OTHER; note = 2'-O-methylguanosine
  modified_base 86: mod_base = OTHER; note = 2'-O-methyladenosine
  modified_base 87: mod_base = OTHER; note = 2'-O-methylguanosine
  modified_base 117: mod_base = OTHER; note = 2'-O-methyladenosine
  modified_base 118: mod_base = OTHER; note = 2'-O-methyluridine phosphorothioate
  modified_base 119: mod_base = OTHER; note = 2'-O-methyluridine phosphorothioate
  modified_base 120: mod_base = OTHER; note = 2'-O-methylcytidine

SEQ ID NO: 393 - RNA, 120 nt, synthetic construct; identical to SEQ ID NO: 5
  source 1..120: mol_type = other RNA
  modified_base 1: mod_base = OTHER; note = 2'-O-methylguanosine phosphorothioate
  modified_base 2: mod_base = OTHER; note = 2'-O-methyluridine phosphorothioate
  modified_base 3: mod_base = OTHER; note = 2'-O-methyluridine
  modified_base 98: mod_base = OTHER; note = 2'-O-methyladenosine
  modified_base 104: mod_base = OTHER; note = 2'-O-methyluridine
  modified_base 105: mod_base = OTHER; note = 2'-O-methylcytidine
  modified_base 109: mod_base = OTHER; note = 2'-O-methylguanosine
  modified_base 110: mod_base = OTHER; note = 2'-O-methylguanosine
  modified_base 117: mod_base = OTHER; note = 2'-O-methyladenosine
  modified_base 118: mod_base = OTHER; note = 2'-O-methyluridine phosphorothioate
  modified_base 119: mod_base = OTHER; note = 2'-O-methyluridine phosphorothioate
  modified_base 120: mod_base = OTHER; note = 2'-O-methylcytidine

SEQ ID NO: 394 - RNA, 120 nt, synthetic construct; identical to SEQ ID NO: 5
  source 1..120: mol_type = other RNA
  modified_base 1: mod_base = OTHER; note = 2'-O-methylguanosine phosphorothioate
  modified_base 2: mod_base = OTHER; note = 2'-O-methyluridine phosphorothioate
  modified_base 3: mod_base = OTHER; note = 2'-O-methyluridine
  modified_base 4: mod_base = OTHER; note = 2'-O-methylcytidine
  modified_base 5: mod_base = OTHER; note = 2'-O-methyluridine
  modified_base 6: mod_base = OTHER; note = 2'-O-methylguanosine
  modified_base 7: mod_base = OTHER; note = 2'-O-methyluridine
  modified_base 11: mod_base = OTHER; note = 2'-O-methyluridine
  modified_base 16: mod_base = OTHER; note = 2'-O-methylcytidine
  modified_base 17: mod_base = OTHER; note = 2'-O-methyladenosine
  modified_base 18: mod_base = OTHER; note = 2'-O-methylguanosine
  modified_base 19: mod_base = OTHER; note = 2'-O-methylguanosine
  modified_base 20: mod_base = OTHER; note = 2'-O-methyladenosine
  modified_base 21: mod_base = OTHER; note = 2'-O-methylcytidine
  modified_base 25: mod_base = OTHER; note = 2'-O-methylcytidine
  modified_base 26: mod_base = OTHER; note = 2'-O-methylguanosine
  modified_base 27: mod_base = OTHER; note = 2'-O-methyluridine
  modified_base 28: mod_base = OTHER; note = 2'-O-methylcytidine
  modified_base 29: mod_base = OTHER; note = 2'-O-methyluridine
  modified_base 30: mod_base = OTHER; note = 2'-O-methyladenosine
  modified_base 31: mod_base = OTHER; note = 2'-O-methylguanosine
  modified_base 39: mod_base = OTHER; note = 2'-O-methyluridine
  modified_base 42: mod_base = OTHER; note = 2'-O-methyluridine
  modified_base 45: mod_base = OTHER; note = 2'-O-methyladenosine
  modified_base 46: mod_base = OTHER; note = 2'-O-methylguanosine
  modified_base 47: mod_base = OTHER; note = 2'-O-methylguanosine
  modified_base 48: mod_base = OTHER; note = 2'-O-methylguanosine
  modified_base 49: mod_base = OTHER; note = 2'-O-methyluridine
  modified_base 50: mod_base = OTHER; note = 2'-O-methylguanosine
  modified_base 51: mod_base = OTHER; note = 2'-O-methyluridine
  modified_base 52: mod_base = OTHER; note = 2'-O-methylguanosine
  modified_base 57: mod_base = OTHER; note = 2'-O-methyladenosine
  modified_base 58: mod_base = OTHER; note = 2'-O-methylcytidine
  modified_base 59: mod_base = OTHER; note = 2'-O-methyluridine
  modified_base 60: mod_base = OTHER; note = 2'-O-methylcytidine
  modified_base 61: mod_base = OTHER; note = 2'-O-methylcytidine
  modified_base 62: mod_base = OTHER; note = 2'-O-methyluridine
  modified_base 64: mod_base = OTHER; note = 2'-O-methyluridine
  modified_base 65: mod_base = OTHER; note = 2'-O-methyluridine
  modified_base 70: mod_base = OTHER; note = 2'-O-methylguanosine
  modified_base 71: mod_base = OTHER; note = 2'-O-methyladenosine
  modified_base 72: mod_base = OTHER; note = 2'-O-methylcytidine
  modified_base 73: mod_base = OTHER; note = 2'-O-methylguanosine
  modified_base 74: mod_base = OTHER; note = 2'-O-methyladenosine
  modified_base 75: mod_base = OTHER; note = 2'-O-methyluridine
  modified_base 76: mod_base = OTHER; note = 2'-O-methylguanosine
  modified_base 77: mod_base = OTHER; note = 2'-O-methyluridine
  modified_base 78: mod_base = OTHER; note = 2'-O-methylcytidine
  modified_base 79: mod_base = OTHER; note = 2'-O-methyluridine
  modified_base 80: mod_base = OTHER; note = 2'-O-methylcytidine
  modified_base 81: mod_base = OTHER; note = 2'-O-methyluridine
  modified_base 82: mod_base = OTHER; note = 2'-O-methyluridine
  modified_base 83: mod_base = OTHER; note = 2'-O-methyladenosine
  modified_base 84: mod_base = OTHER; note = 2'-O-methylcytidine
  modified_base 85: mod_base = OTHER; note = 2'-O-methylguanosine
  modified_base 86: mod_base = OTHER; note = 2'-O-methyladenosine
  modified_base 87: mod_base = OTHER; note = 2'-O-methylguanosine
  modified_base 98: mod_base = OTHER; note = 2'-O-methyladenosine
  modified_base 104: mod_base = OTHER; note = 2'-O-methyluridine
  modified_base 105: mod_base = OTHER; note = 2'-O-methylcytidine
  modified_base 109: mod_base = OTHER; note = 2'-O-methylguanosine
  modified_base 110: mod_base = OTHER; note = 2'-O-methylguanosine
  modified_base 117: mod_base = OTHER; note = 2'-O-methyladenosine
  modified_base 118: mod_base = OTHER; note = 2'-O-methyluridine phosphorothioate
  modified_base 119: mod_base = OTHER; note = 2'-O-methyluridine phosphorothioate
  modified_base 120: mod_base = OTHER; note = 2'-O-methylcytidine

SEQ ID NO: 395 - RNA, 120 nt, synthetic construct; identical to SEQ ID NO: 5
  source 1..120: mol_type = other RNA
  modified_base 1: mod_base = OTHER; note = 2'-O-methylguanosine phosphorothioate
  modified_base 2: mod_base = OTHER; note = 2'-O-methyluridine phosphorothioate
  modified_base 3: mod_base = OTHER; note = 2'-O-methyluridine
  modified_base 4: mod_base = OTHER; note = 2'-O-methylcytidine
  modified_base 5: mod_base = OTHER; note = 2'-O-methyluridine
  modified_base 6: mod_base = OTHER; note = 2'-O-methylguanosine
  modified_base 7: mod_base = OTHER; note = 2'-O-methyluridine
  modified_base 11: mod_base = OTHER; note = 2'-O-methyluridine
  modified_base 16: mod_base = OTHER; note = 2'-O-methylcytidine
  modified_base 17: mod_base = OTHER; note = 2'-O-methyladenosine
  modified_base 18: mod_base = OTHER; note = 2'-O-methylguanosine
  modified_base 19: mod_base = OTHER; note = 2'-O-methylguanosine
  modified_base 20: mod_base = OTHER; note = 2'-O-methyladenosine
  modified_base 21: mod_base = OTHER; note = 2'-O-methylcytidine
  modified_base 25: mod_base = OTHER; note = 2'-O-methylcytidine
  modified_base 26: mod_base = OTHER; note = 2'-O-methylguanosine
  modified_base 27: mod_base = OTHER; note = 2'-O-methyluridine
  modified_base 28: mod_base = OTHER; note = 2'-O-methylcytidine
  modified_base 29: mod_base = OTHER; note = 2'-O-methyluridine
  modified_base 30: mod_base = OTHER; note = 2'-O-methyladenosine
  modified_base 31: mod_base = OTHER; note = 2'-O-methylguanosine
  modified_base 39: mod_base = OTHER; note = 2'-O-methyluridine
  modified_base 42: mod_base = OTHER; note = 2'-O-methyluridine
  modified_base 45: mod_base = OTHER; note = 2'-O-methyladenosine
  modified_base 46: mod_base = OTHER; note = 2'-O-methylguanosine
  modified_base 47: mod_base = OTHER; note = 2'-O-methylguanosine
  modified_base 48: mod_base = OTHER; note = 2'-O-methylguanosine
  modified_base 49: mod_base = OTHER; note = 2'-O-methyluridine
  modified_base 50: mod_base = OTHER; note = 2'-O-methylguanosine
  modified_base 51: mod_base = OTHER; note = 2'-O-methyluridine
  modified_base 52: mod_base = OTHER; note = 2'-O-methylguanosine
  modified_base 57: mod_base = OTHER; note = 2'-O-methyladenosine
  modified_base 58: mod_base = OTHER; note = 2'-O-methylcytidine
  modified_base 59: mod_base = OTHER; note = 2'-O-methyluridine
  modified_base 60: mod_base = OTHER; note = 2'-O-methylcytidine
  modified_base 61: mod_base = OTHER; note = 2'-O-methylcytidine
  modified_base 62: mod_base = OTHER; note = 2'-O-methyluridine
  modified_base 64: mod_base = OTHER; note = 2'-O-methyluridine
  modified_base 65: mod_base = OTHER; note = 2'-O-methyluridine
  modified_base 70: mod_base = OTHER; note = 2'-O-methylguanosine
  modified_base 71: mod_base = OTHER; note = 2'-O-methyladenosine
  modified_base 72: mod_base = OTHER; note = 2'-O-methylcytidine
  modified_base 73: mod_base = OTHER; note = 2'-O-methylguanosine
  modified_base 74: mod_base = OTHER; note = 2'-O-methyladenosine
  modified_base 75: mod_base = OTHER; note = 2'-O-methyluridine
  modified_base 76: mod_base = OTHER; note = 2'-O-methylguanosine
  modified_base 77: mod_base = OTHER; note = 2'-O-methyluridine
  modified_base 78: mod_base = OTHER; note = 2'-O-methylcytidine
  modified_base 79: mod_base = OTHER; note = 2'-O-methyluridine
  modified_base 80: mod_base = OTHER; note = 2'-O-methylcytidine
  modified_base 81: mod_base = OTHER; note = 2'-O-methyluridine
  modified_base 82: mod_base = OTHER; note = 2'-O-methyluridine
  modified_base 83: mod_base = OTHER; note = 2'-O-methyladenosine
  modified_base 84: mod_base = OTHER; note = 2'-O-methylcytidine
  modified_base 85: mod_base = OTHER; note = 2'-O-methylguanosine
  modified_base 86: mod_base = OTHER; note = 2'-O-methyladenosine
  modified_base 87: mod_base = OTHER; note = 2'-O-methylguanosine
  modified_base 98: mod_base = OTHER; note = 2'-O-methyladenosine
  modified_base 101: mod_base = OTHER; note = 2'-O-methyluridine
  modified_base 104: mod_base = OTHER; note = 2'-O-methyluridine
  modified_base 105: mod_base = OTHER; note = 2'-O-methylcytidine
  modified_base 108: mod_base = OTHER; note = 2'-O-methyluridine
  modified_base 109: mod_base = OTHER; note = 2'-O-methylguanosine
  modified_base 110: mod_base = OTHER; note = 2'-O-methylguanosine
  modified_base 115: mod_base = OTHER; note = 2'-O-methyluridine
  modified_base 117: mod_base = OTHER; note = 2'-O-methyladenosine
  modified_base 118: mod_base = OTHER; note = 2'-O-methyluridine phosphorothioate
  modified_base 119: mod_base = OTHER; note = 2'-O-methyluridine phosphorothioate
  modified_base 120: mod_base = OTHER; note = 2'-O-methylcytidine

SEQ ID NO: 396 - RNA, 120 nt, synthetic construct; identical to SEQ ID NO: 5
  source 1..120: mol_type = other RNA
  modified_base 1: mod_base = OTHER; note = 2'-O-methylguanosine phosphorothioate
  modified_base 2: mod_base = OTHER; note = 2'-O-methyluridine phosphorothioate
  modified_base 3: mod_base = OTHER; note = 2'-O-methyluridine
  modified_base 4: mod_base = OTHER; note = 2'-O-methylcytidine
  modified_base 5: mod_base = OTHER; note = 2'-O-methyluridine
  modified_base 6: mod_base = OTHER; note = 2'-O-methylguanosine
  modified_base 7: mod_base = OTHER; note = 2'-O-methyluridine
  modified_base 11: mod_base = OTHER; note = 2'-O-methyluridine
  modified_base 16: mod_base = OTHER; note = 2'-O-methylcytidine
  modified_base 17: mod_base = OTHER; note = 2'-O-methyladenosine
  modified_base 18: mod_base = OTHER; note = 2'-O-methylguanosine
  modified_base 19: mod_base = OTHER; note = 2'-O-methylguanosine
  modified_base 20: mod_base = OTHER; note = 2'-O-methyladenosine
  modified_base 21: mod_base = OTHER; note = 2'-O-methylcytidine
  modified_base 25: mod_base = OTHER; note = 2'-O-methylcytidine
  modified_base 26: mod_base = OTHER; note = 2'-O-methylguanosine
  modified_base 27: mod_base = OTHER; note = 2'-O-methyluridine
  modified_base 28: mod_base = OTHER; note = 2'-O-methylcytidine
  modified_base 29: mod_base = OTHER; note = 2'-O-methyluridine
  modified_base 30: mod_base = OTHER; note = 2'-O-methyladenosine
  modified_base 31: mod_base = OTHER; note = 2'-O-methylguanosine
  modified_base 33: mod_base = OTHER; note = 2'-O-methyluridine
  modified_base 39: mod_base = OTHER; note = 2'-O-methyluridine
  modified_base 42: mod_base = OTHER; note = 2'-O-methyluridine
  modified_base 45: mod_base = OTHER; note = 2'-O-methyladenosine
  modified_base 46: mod_base = OTHER; note = 2'-O-methylguanosine
  modified_base 47: mod_base = OTHER; note = 2'-O-methylguanosine
  modified_base 48: mod_base = OTHER; note = 2'-O-methylguanosine
  modified_base 49: mod_base = OTHER; note = 2'-O-methyluridine
  modified_base 50: mod_base = OTHER; note = 2'-O-methylguanosine
  modified_base 51: mod_base = OTHER; note = 2'-O-methyluridine
  modified_base 52: mod_base = OTHER; note = 2'-O-methylguanosine
  modified_base 57: mod_base = OTHER; note = 2'-O-methyladenosine
  modified_base 58: mod_base = OTHER; note = 2'-O-methylcytidine
  modified_base 59: mod_base = OTHER; note = 2'-O-methyluridine
  modified_base 60: mod_base = OTHER; note = 2'-O-methylcytidine
  modified_base 61: mod_base = OTHER; note = 2'-O-methylcytidine
  modified_base 62: mod_base = OTHER; note = 2'-O-methyluridine
  modified_base 64: mod_base = OTHER; note = 2'-O-methyluridine
  modified_base 65: mod_base = OTHER; note = 2'-O-methyluridine
  modified_base 70: mod_base = OTHER; note = 2'-O-methylguanosine
  modified_base 71: mod_base = OTHER; note = 2'-O-methyladenosine
  modified_base 72: mod_base = OTHER; note = 2'-O-methylcytidine
  modified_base 73: mod_base = OTHER; note = 2'-O-methylguanosine
  modified_base 74: mod_base = OTHER; note = 2'-O-methyladenosine
  modified_base 75: mod_base = OTHER; note = 2'-O-methyluridine
  modified_base 76: mod_base = OTHER; note = 2'-O-methylguanosine
  modified_base 77: mod_base = OTHER; note = 2'-O-methyluridine
  modified_base 78: mod_base = OTHER; note = 2'-O-methylcytidine
  modified_base 79: mod_base = OTHER; note = 2'-O-methyluridine
  modified_base 80: mod_base = OTHER; note = 2'-O-methylcytidine
  modified_base 81: mod_base = OTHER; note = 2'-O-methyluridine
  modified_base 82: mod_base = OTHER; note = 2'-O-methyluridine
  modified_base 83: mod_base = OTHER; note = 2'-O-methyladenosine
  modified_base 84: mod_base = OTHER; note = 2'-O-methylcytidine
  modified_base 85: mod_base = OTHER; note = 2'-O-methylguanosine
  modified_base 86: mod_base = OTHER; note = 2'-O-methyladenosine
  modified_base 87: mod_base = OTHER; note = 2'-O-methylguanosine
  modified_base 89: mod_base = OTHER; note = 2'-O-methylcytidine
  modified_base 98: mod_base = OTHER; note = 2'-O-methyladenosine
  modified_base 101: mod_base = OTHER; note = 2'-O-methyluridine
  modified_base 104: mod_base = OTHER; note = 2'-O-methyluridine
  modified_base 105: mod_base = OTHER; note = 2'-O-methylcytidine
  modified_base 108: mod_base = OTHER; note = 2'-O-methyluridine
  modified_base 109: mod_base = OTHER; note = 2'-O-methylguanosine
  modified_base 110: mod_base = OTHER; note = 2'-O-methylguanosine
  modified_base 115: mod_base = OTHER; note = 2'-O-methyluridine
  modified_base 117: mod_base = OTHER; note = 2'-O-methyladenosine
  modified_base 118: mod_base = OTHER; note = 2'-O-methyluridine phosphorothioate
  modified_base 119: mod_base = OTHER; note = 2'-O-methyluridine phosphorothioate
  modified_base 120: mod_base = OTHER; note = 2'-O-methylcytidine

SEQ ID NO: 397 - RNA, 123 nt, synthetic construct; identical to SEQ ID NO: 6
  source 1..123: mol_type = other RNA
  modified_base 1: mod_base = OTHER; note = 2'-O-methylguanosine phosphorothioate
  modified_base 2: mod_base = OTHER; note = 2'-O-methyluridine phosphorothioate
  modified_base 3: mod_base = OTHER; note = 2'-O-methyluridine
  modified_base 4: mod_base = OTHER; note = 2'-O-methylcytidine
  modified_base 5: mod_base = OTHER; note = 2'-O-methyluridine
  modified_base 6: mod_base = OTHER; note = 2'-O-methylguanosine
  modified_base 7: mod_base = OTHER; note = 2'-O-methyluridine
  modified_base 11: mod_base = OTHER; note = 2'-O-methyluridine
  modified_base 16: mod_base = OTHER; note = 2'-O-methylcytidine
  modified_base 17: mod_base = OTHER; note = 2'-O-methyladenosine
  modified_base 18: mod_base = OTHER; note = 2'-O-methylguanosine
  modified_base 19: mod_base = OTHER; note = 2'-O-methylguanosine
  modified_base 20: mod_base = OTHER; note = 2'-O-methyladenosine
  modified_base 21: mod_base = OTHER; note = 2'-O-methylcytidine
  modified_base 25: mod_base = OTHER; note = 2'-O-methylcytidine
  modified_base 26: mod_base = OTHER; note = 2'-O-methylguanosine
  modified_base 27: mod_base = OTHER; note = 2'-O-methyluridine
  modified_base 28: mod_base = OTHER; note = 2'-O-methylcytidine
  modified_base 29: mod_base = OTHER; note = 2'-O-methyluridine
  modified_base 30: mod_base = OTHER; note = 2'-O-methyladenosine
  modified_base 31: mod_base = OTHER; note = 2'-O-methylguanosine
  modified_base 39: mod_base = OTHER; note = 2'-O-methyluridine
  modified_base 41: mod_base = OTHER; note = 2'-O-methyluridine
  modified_base 44: mod_base = OTHER; note = 2'-O-methyladenosine
  modified_base 45: mod_base = OTHER; note = 2'-O-methylguanosine
  modified_base 46: mod_base = OTHER; note = 2'-O-methylguanosine
  modified_base 47: mod_base = OTHER; note = 2'-O-methylguanosine
  modified_base 48: mod_base = OTHER; note = 2'-O-methyluridine
  modified_base 49: mod_base = OTHER; note = 2'-O-methylguanosine
  modified_base 50: mod_base = OTHER; note = 2'-O-methyluridine
  modified_base 51: mod_base = OTHER; note = 2'-O-methylguanosine
  modified_base 56: mod_base = OTHER; note = 2'-O-methyladenosine
  modified_base 57: mod_base = OTHER; note = 2'-O-methylcytidine
  modified_base 58: mod_base = OTHER; note = 2'-O-methyluridine
  modified_base 59: mod_base = OTHER; note = 2'-O-methylcytidine
  modified_base 60: mod_base = OTHER; note = 2'-O-methylcytidine
  modified_base 61: mod_base = OTHER; note = 2'-O-methyluridine
  modified_base 63: mod_base = OTHER; note = 2'-O-methyluridine
  modified_base 64: mod_base = OTHER; note = 2'-O-methyluridine
  modified_base 69: mod_base = OTHER; note = 2'-O-methylguanosine
  modified_base 70: mod_base = OTHER; note = 2'-O-methyladenosine
  modified_base 71: mod_base = OTHER; note = 2'-O-methylcytidine
  modified_base 72: mod_base = OTHER; note = 2'-O-methylguanosine
  modified_base 73: mod_base = OTHER; note = 2'-O-methyladenosine
  modified_base 74: mod_base = OTHER; note = 2'-O-methyluridine
  modified_base 75: mod_base = OTHER; note = 2'-O-methylguanosine
  modified_base 76: mod_base = OTHER; note = 2'-O-methyluridine
  modified_base 77: mod_base = OTHER; note = 2'-O-methylcytidine
  modified_base 78: mod_base = OTHER; note = 2'-O-methyluridine
  modified_base 79: mod_base = OTHER; note = 2'-O-methylcytidine
  modified_base 80: mod_base = OTHER; note = 2'-O-methyluridine
  modified_base 81: mod_base = OTHER; note = 2'-O-methyluridine
  modified_base 82: mod_base = OTHER; note = 2'-O-methyladenosine
  modified_base 83: mod_base = OTHER; note = 2'-O-methylcytidine
  modified_base 84: mod_base = OTHER; note = 2'-O-methylguanosine
  modified_base 85: mod_base = OTHER; note = 2'-O-methyladenosine
  modified_base 86: mod_base = OTHER; note = 2'-O-methylguanosine
  modified_base 120: mod_base = OTHER; note = 2'-O-methyluridine
  modified_base 121: mod_base = OTHER; note = 2'-O-methyluridine phosphorothioate
  modified_base 122: mod_base = OTHER; note = 2'-O-methyluridine phosphorothioate
  modified_base 123: mod_base = OTHER; note = 2'-O-methyluridine

SEQ ID NO: 398 - RNA, 120 nt, synthetic construct; identical to SEQ ID NO: 84
  source 1..120: mol_type = other RNA
  modified_base 1: mod_base = OTHER; note = 2'-O-methylguanosine phosphorothioate
  modified_base 2: mod_base = OTHER; note = 2'-O-methyluridine phosphorothioate
  modified_base 3: mod_base = OTHER; note = 2'-O-methyluridine phosphorothioate
  modified_base 5: mod_base = OTHER; note = 2'-O-methyluridine
  modified_base 16: mod_base = OTHER; note = 2'-O-methylcytidine
  modified_base 21: mod_base = OTHER; note = 2'-O-methylcytidine
  modified_base 22: mod_base = OTHER; note = Nebularine
  modified_base 23: mod_base = OTHER; note = Nebularine
  modified_base 25: mod_base = OTHER; note = 2'-O-methylcytidine
  modified_base 26: mod_base = OTHER; note = 2'-O-methylguanosine
  modified_base 29: mod_base = OTHER; note = 2'-O-methyluridine
  modified_base 30: mod_base = OTHER; note = Nebularine
  modified_base 34: mod_base = OTHER; note = Nebularine
  modified_base 36: mod_base = OTHER; note = Nebularine
  modified_base 37: mod_base = OTHER; note = Nebularine
  modified_base 44: mod_base = OTHER; note = 2'-O-methylcytidine
  modified_base 45: mod_base = OTHER; note = Nebularine
  modified_base 49: mod_base = OTHER; note = 2'-O-methyluridine
  modified_base 50: mod_base = OTHER; note = 2'-O-methylguanosine
  modified_base 53: mod_base = OTHER; note = Nebularine
  modified_base 55: mod_base = OTHER; note = Nebularine
  modified_base 56: mod_base = OTHER; note = Nebularine
  modified_base 57: mod_base = OTHER; note = Nebularine
  modified_base 62: mod_base = OTHER; note = 2'-O-methyluridine
  modified_base 63: mod_base = OTHER; note = Nebularine
  modified_base 67: mod_base = OTHER; note = 2'-O-methylcytidine
  modified_base 68: mod_base = OTHER; note = 2'-O-methyluridine
  modified_base 69: mod_base = OTHER; note = 2'-O-methylguanosine
  modified_base 71: mod_base = OTHER; note = Nebularine
  modified_base 72: mod_base = OTHER; note = 2'-O-methylcytidine
  modified_base 74: mod_base = OTHER; note = Nebularine
  modified_base 75: mod_base = OTHER; note = 2'-O-methyluridine
  modified_base 76: mod_base = OTHER; note = 2'-O-methylguanosine
  modified_base 79: mod_base = OTHER; note = 2'-O-methyluridine
  modified_base 82: mod_base = OTHER; note = 2'-O-methyluridine
  modified_base 83: mod_base = OTHER; note = Nebularine
  modified_base 84: mod_base = OTHER; note = 2'-O-methylcytidine
  modified_base 86: mod_base = OTHER; note = Nebularine
  modified_base 90: mod_base = OTHER; note = Nebularine
  modified_base 93: mod_base = OTHER; note = Nebularine
  modified_base 96: mod_base = OTHER; note = Nebularine
  modified_base 98: mod_base = OTHER; note = Nebularine
  modified_base 99: mod_base = OTHER; note = Nebularine
  modified_base 102: mod_base = OTHER; note = Nebularine
  modified_base 103: mod_base = OTHER; note = Nebularine
  modified_base 105: mod_base = OTHER; note = Nebularine
  modified_base 108: mod_base = OTHER; note = Nebularine
  modified_base 110: mod_base = OTHER; note = Nebularine
  modified_base 114: mod_base = OTHER; note = Nebularine
  modified_base 115: mod_base = OTHER; note = Nebularine
  modified_base 116: mod_base = OTHER; note = Nebularine
  modified_base 117: mod_base = OTHER; note = 2'-O-methyluridine phosphorothioate
  modified_base 118: mod_base = OTHER; note = Nebularine phosphorothioate
  modified_base 119: mod_base = OTHER; note = Nebularine phosphorothioate
  modified_base 120: mod_base = OTHER; note = Nebularine

SEQ ID NO: 399 - RNA, 120 nt, synthetic construct; identical to SEQ ID NO: 85
  source 1..120: mol_type = other RNA
  modified_base 1: mod_base = OTHER; note = 2'-O-methylguanosine phosphorothioate
  modified_base 2: mod_base = OTHER; note = 2'-O-methyluridine phosphorothioate
  modified_base 3: mod_base = OTHER; note = 2'-O-methyluridine phosphorothioate
  modified_base 22: mod_base = OTHER; note = Nebularine
  modified_base 23: mod_base = OTHER; note = Nebularine
  modified_base 36: mod_base = OTHER; note = Nebularine
  modified_base 37: mod_base = OTHER; note = Nebularine
  modified_base 53: mod_base = OTHER; note = Nebularine
  modified_base 55: mod_base = OTHER; note = Nebularine
  modified_base 56: mod_base = OTHER; note = 2'-O-methylnebularine
  modified_base 83: mod_base = OTHER; note = 2'-O-methylnebularine
  modified_base 117: mod_base = OTHER; note = 2'-O-methyluridine phosphorothioate
  modified_base 118: mod_base = OTHER; note = 2'-O-methyladenosine phosphorothioate
  modified_base 119: mod_base = OTHER; note = 2'-O-methyladenosine phosphorothioate
  modified_base 120: mod_base = OTHER; note = 2'-O-methyladenosine